United States Patent Application Publication US 2015/0133362 A1 - sequence listing, part 3

SEQ ID NO: 805 - DNA, 129338 bp, Homo sapiens
cagggaattctccgggctccaactgaggatccctcactgagttgctgtgtaatctggggcatgtaaaccctttgcgcctcagtttcttcatttgtaaaatgagattggtaaactagcgggtctatgaagtttttttctagctcttatgcactggatgataaagcagtctgccactctcttgaatggaagaagatgggggtactgtgctgtcatatgattatttttcgaggacattttctttgagcagcaaaagttattaaatagtacaaagagtaaaaaatagatctggtcaagaccattgatctggggaagagagggtattcaggataagatacagcctgtctaccacacatctctactatgtaccatttatggcagatattcccatgtatttctattgtccagcaaacaccaaacagacccttacgcttaaattctggaaattctttagggtgctcatttattttaaaatacaattagaatcgagcttctttcctggttatttaatattctcttgataatagacatatatttttagttttaattctaatggatgaaatcacctttctaccttataaatataataatcattgtaaagaacctttgaaccatataaaaaacaataaataaaaagagaaatttatctcccttggaagccttccctctctatcctgccctcagagagaatgtgttatctcatctcttattcttccagataatttgtatgtatttatgcaaacacatgtatatatatatgtattatcacttttgttttatttcattgaattttaatgaatcttttgggaaatacattagtcctagagtagaatcatgctgtaaaatagatgagtaagcacattaacaaactagaagattaaggagcaaaatagaaaacaactgaaaacattcagttgctaatcaaattgtcagctgataggattcttaaatgacagatattctaggcagaactgacctgagagaaggactacgtaaaatggtctgttttggggggttatttataggggataggactagggtcattgtggaagatggccaccaacaattcctccatgcctctacacgcatgccacccttcccaccaaaaggagatggagtctgtttcccctcccttgaatcttttttcagcttccccagtagctagaactacaggcacatgccaccatgcccagctaattattatttttttgtagagactggggtcttgctatgttgtcctggcctcaggcaattcttccctctcagcctcccaaaatgctgggattataggtatgagccaccatgcctagctaatttggtttttaaatattttattttaaaagaattttttttttgaggcagagtctcgctctgttgcccaggctagagtgcagtggtgcgatttcggctcactgcaacctctacctcccgagttcaagcgattctcctgctccaccctcccaaatagctaggattacaagcatgcgccaccactcccagctaatttttgtatttttattagagatggggtttcaccatattggccagtctggtctcaaacccctgacctcaagtgatccgcctgccttggcctcccaaagtgctgggattacaagtgtgggccatcgtgtgtggcctggaaaaaattctagacttagaaaaaagttgcaaaaatggtatggatttttttttttttttttttttttgacacagggtttcactgtcaccaggctggagtatagtggtgcgatcactgctcactgcaactttgacctcctggggctcaggtgatcttcccacctcagcctcccaagtagctgggactataggcacacaccaccatgcccagctaatttttgtattttttgtagagacatggtttttccattttgcccaggctggtctcaacctcctgagctcaagcaatctacccacctggcctcccaaagtgctaagatgacaggagtgagccaccatgcctggcctggtgtggagtttacgtatacttgttatccagcagccctagtattgataactttttttttttttaaagagatgggggtcttggccaggcacagtggctcacgcctataatcccagcactttgggaggccgaggtgggcggattgcgtgaggctaggagttcaagaccagcctggccaacatggcaaaaccccatctctactaaaaatacaaaaattagctgtgcgtggtggcatgcgcccataatcccagctacttgggaggccaaggtaagagaatcgcttgaaccaggaggtgaaggttgccgtgagccgagattgcaccactgcactccaacctggctgacagagtgagattctgcctcaaaaaaaaaaaaaaaaaaaattccctgctttcaagagacggggtctcactatgttgcccaggttggtctcgaactcctgggttcaagccatcctcccacttcagcctcctaaagtgtcagaattacaggcatgagccactgttcctggccaataacttattaatagccacagaacgattatcaaaaccaggaaattagcacaaggtacgaaccttatatgaaattcacttgtttttgtagtgatgttctttttctgttccaagatttaatccaggttcccttacttgctcttagttgatatgtctccttagtctggggaaaagacttctaacagagctggaagagcagtgagaaaattgctattgaaggttggagaaatggtgttagtagtggcaagatgtttgacaacccttgtggtcagatgtatggtaaaacatagaagacagaaagtgtacctaataaacttgtggatttggcaacattcaggctgaatgttcagagtgacaattggcttcttttagggatgtacgaagatacacaagtgatgtatgatgataacacaagagacagagatgtgttaaaaaaggaactatcccatttttaagcagagtctctttatgccagaaagactctcaaagtaagaaatggcctcaagggcctgcctgtagaattggcctcaagttaaagatcttatcgagacttggtgctaagacctctaaaatatttaagatattgcctctcatctagacaaaaggtcttctaagaatcttaagtgttgtcccacagtagtcacctctacaggtccacagtagagagaggttttttaaatttttaatttaaatttttaatttttttcagagacagagtctcgctatgtttcctaggctggtctcaaactgctggcctcaagcaatcctcccaccttggcctcccaaagtgctaggactacaggcagagaggtttgtttttgaaagaattatagatgttgctttgcgggcaagaagtgaaccccaataagagtcacaaaattttaaagagagttatatggataaaattgcaccagcttggactaaggaagagacagttcaaaatgaaaaaaccttccaagcccccaacttcctacgggcaggaagcaggctgagagagttatttaactgtaaaaggaaggaaggcagtttcttttcttttttttttttggtggtgttagtaacttttattgaagcggcagtgtacagcagcagaggtactgctccttgcagagcaggctaacccacaagcgatgtgcccggcgtagctgctcaaaagcagttctgcgcttatatttatacctacttttttgtttttgtttttgtttttttattatactttaagttctagggtacatgtgcacaatgtgcaggtttgttacatatgtatacatgtgctgtgttggtttgctgtacccattaactggttatttatattaggtatttctcctaatgctatccctcccccatcccccccacgacaggccctggtgtgtgacattccccgccgtgtgtccaagtgttctcattattcaattcccacctatgagtgagaacatgtggtgtctggttttctatccttgtgatagtttgctcagaatgatggtttctaacttcatccatgtccctacaaaggacatgaagctcatccttttttatggctgcatagtattccatggtgtgtacgtgccacattttctaaatccagtctatcattgatggacattttatgttggttccaagtctttgctattgtgaatagtacctcaataaacatacgtgtgcatgtgtttttatagtagcatgatttataatcctttgggtatatacccagtaatgggattgctgggtcaaatggtatttctagttccagatccttgaggaatcgccacactgtcttccacaatggttgaactagtttacagtcccaccaacagtgtaaaagctattctccacatcctctccagcatctgttgtttcctgattttttaattatcaccattctaactggtgtgagatggtatctcattgtggttttgatttgcatttctctgacgaccagcgatgacgagcattttttcatgtgtctgttcactgcataaatgtctataaatgtcttcttttggaaagtgtctgttcatatcctttgcccactttttgatggggctgctttactttttcttgtaaatttgtttaagttctttttagattctggatattagccctttgtcagatgggtagattgtaaaaattttctcccattctgtaggttgtctgttcactctgatggtagtttcttttgctgtgcagaagctctttagtttaattagatcccatttgtctattttggcttttgttgccattgcttttggtgttttagtcatgaagtccttgcccatgcctatgtcctgaatggtattgcctaggttttcttctagggtttttatagtttttatgtctaacatttaagtctttaatccatattgaattaatttttgtataaggtgtaaggaaaggatccagtttcagctttctacatatggctagccagttttcccagcaccatttattaaatagggaatcttttccccatttcttgtttttgtcaggtttgtcaaagatcagatggttgtagatgtgtggtgttatttctgaagcctctgttcaaggaaggcagtttcttatgaaaaaggaaaattgattcagagttcctagtctagaccccagagggtggaactaagagctcttgagaacaacgcattgggaaactattctgagggaggccaacctaggcactaatggagaacttgatcctcagaggaccggtaacagtgcttggctggatttcagaattgctatggactaatgactgctatatgccttccatttccgccattttcaaacaggcgtgtctactgcagttatcctatccctttttcagcattgtatgttgtgtatgtaacttctcttttagttaacaggtctccagatgaagaaaagctgcatctgaaatgcctcatccacatctaggcctagtatagattactagatcctgaagtttaacactgatgctatatagaataatagttttggagaaagggagtgagtgtattctgcatgtcgtgtgtgtgtgtgtgtgcatgtatgtgcatatgtatactgttgtagctggaggatggatcatgatagactatttcccaaattgactggcaacaatttctcatcccagctgctacttccatcaaggagtatctttcccttccttttgaatctgggctgtccttgtgacttgcttggccaagagaatgcagtggaagtgacattctgggacttctgaacccaggatttaagagaccctgtattttctgctgtcttcctcttgggatccaggcactgtataaagaagcctgggttggaccactgaataatgagcaaccacacaaagaaaggaggctcctaaccatttttagctactctagctgaggtcccagacatgtggtaagctatcttggacattccagacccagccaaattcacagctgaataaagcacgtctgaccctagctaatgtcattggggagccgacctgtccagctgtgcccttccccaattgcagaattgtgaggaaataaatggtggtagttgttttgagccactaagttttaagcggcccccatggtatcagttcaggtcagacatgtgctttattctgctgtgagtttggctgggtctggaatgtccaagatggcttcccacatgtctgggacctcagttaaagtagctaaaatggttagggactcctttcttgctgtggttgctcatcattcagtggtccagcccaagcttctttacacagtgcctgggtcccaagaggaagacaacagaaagttttaaggtaatttattatgcagcaatagataattgaaaacaattatccagccaggtgcagtggctcacacctgtaatctcagcactttgggaggtggaggtgggcagatcccttcaggccaggaattcaagaccagcctggccaacatggcgaaaccccgtctctactaaaaaaacaaaaaattagccaggcacagtggtgcatgcctgtcatcccagctactcgggagactgaggcaggagaattgcttaaacacctcgggaggcggaggttgcagtgagctgagattgtgctactgcactccagcctgggcaacagagcgagactgtctcaaaaacaaaacaaaacaattatcaaatgtcagggtatcttcctattgctttacctttactctgtgggctgggaagaagttgtaacaatgtcagccatagaagtcaagttttcaatgcagactaaattccatgacagtgaacactatatgccatagtagtcactgctctgtccatagagcttagaacagtattgccacttaataggctcccaaatatttgttgattgaatcattaaataaatgaattgagataagatcccctaccctcaagaggatggacaaaaaagattctttaaatggagtgtggagtcttaataagggaaaagaagtaaagaaaaagcagataagctctaagtctgccttttttcatggtccagggctatttgtcccatgcattttctctttgaaaaaggtgctgttttttgtgatgccttagaggccagaaggatgttttgaaggggaaaattgtaggagttaggcagagcagggttttggctccttctcaatgtccctctacctagacaaattcgggctattctgcagaggttgcagtgagccatgatcacgtcactgcactccagcctgaggaacagagggagactccgtctcaaaaaaaaaaaaaaaaaaaaaaaaaaaaaaaatttctgcctactctatgaagcacctggtaggtgtcccaatattttctggtatatgggaattacctttttctattattggaaggtctaaaaagcaaacaatgtgctccatatggctagagttagtattaaggggaccaagtagaataattggtagctagtgttagcctggagactaacatagtcaaagctgtcttgtcatgttatgtcttttttatttgtattgctccacggtccaagacaaaatttctgaacgccacttggacacagtgagtacctggtctgctctattgttctcaggagcaaccaactcaacccttatttctctgagaatgatgatttcatacagcacatctctctaccaagatgtgaaagatgacaccatggcatctgaaatagcttcaggagagatttgggacatgggaagcttgtagacaataatggaaaattctcttttagaatatagttacttgtatgacccacagtagcgccttttggagaatgtcttaaaattatctttattgaaagaacaataatgtttgttattaggataaatgaaataaggggaaaacctcagacccttggaacaatgggtttacattcaatccaatgattattatgtttttatattctgtattatttagaaaacagtagttaaacagacagaaatacagaagattgtttaaaaattaaagctattgagttagatccctttttgaaaggtcagcgtatgggagatgagaaaggcactatagagatcagagtgtttacacaaaagacatcttagcagatgacctacaaagagcacatcaagtatttatatcatccacatcaagttgctggtcatttcgcttatcaaagaaaataagaaagaaattttctttcgacattattttggtgtagtaacaatagagttttggaatcagctgttagaagcgataattaaagctagtttaccatgcttactaatcaatctacatagtcaccctgaagctttatataattgtccctttgttacaagcttctacttctccctatggtattctggttctgaatccagacaggtaaagaactaagtatggccgggcgcggtggctcacgcctgtaatcccagcactttgggaggccgtggcgggcagatcacgaggtcaggagatcgagaccatcctgaccaacatggtgaaaccctgtctttactaaactacaaaaaattagcccggcatgatggtgtgcgcctgtagtcccagctactcgggaggctgaggcaggggaattgcttgaacctgggaggcagaggttgcagtgaaccgagatcatgccactgcactccagcctgtgagactccgtctcaaaaaaaaaaaaaaaaaaagaaaaaaaaaaaaagaactgaagtgcttggagaccagtgtattgtaatatctatacagccaagcaggtattttcaactgaactttaaaaaagtactatttttgaaactttctttagtttagatagggccagccatttgggtagaaaggaaaagaaaaacaaaaaattggaaaaggatgcatcagtatttctttcagaaacaacttaacactaggaacagaaggaggattttattcaccaactcctaataaccacctgatgttgctgttgggctggccaaatatctgccaacattgatgatcctttcattcaccactagagagaagtagagggacctgatgtttagagaagcagtaaaacccatttcccattttctttcttcagccggatggaagtacttggaggctggtctcatattctagcactttagtgctggtgatgcagattatctctgctccagagtaactctgtgccatggaatccaagaggattctgtcgcaccaggacaggaatgcacccttgtttcatttgcttccatgaaagcagatttcagagattctcagatgctatgagactaattgtcacttagggtaggctccaggggagggacagagaagggcagtgctaataacagggactctggagacaagatcagcaatctaagaaacaaatgtgagacattttacccctccctaatctactccccttttaaaagttcatcttcattttccctttttctaccacgcagtaattgataattaaacacagctctggtttttaccatgcaatctagtagaacacctagacatcaggaactccttatctttggttatttatacaataatgaaatctgtagttcacgctaggctgtgtggacagtatctgcatctctggaaatcaactggaggcctttctcttactcttttccggttgctttccatttccttttccactgtggtccttgcctttcccaagctgaccagaactatgcacaaaaccagtcttcaataaatatcaacactgaagcttcagcaggttgttaactcctgcacagctatcttaaatgctgtatataagtgcaaagttttatggagcctcagaggtctctaagaacactgtaaatatcccaggtttaattagtagtcccggagttaggtaatggcctgtggctttctgcgctaggtctcttgaggtttctagtcttcagaggttgcctgcaactatgatgtgcacatatacagtactctttctcaaatacagcataaaccctctttagactttgctaggcacttacaattattgaacacacatgcagattgattctcattctctcaaagtttgaaaaacaactcagtgcttcaacctaggtctcgttagatattttttgactcaaattgtcgtctgtagttctacttcctaagggaaatgaaaaaacaataaattcccagactggtgttgatgctcattctctttaagcgggtcgactacttgctttgtagatccttgacgggtggggtgcggggtaggagtgcgatccaactctcagcatttccgaatcagctctctcacggtgacaggtcagcccaatcggggctgtaaacagacttgacaggtttgttctgggctgacggccattgactaggttctcagaccagataagtcacttggctgagtccacagtaggtggggcgcgctcaccagctcaggggtagtgactggacgtttgttgcaacatcggagaatgcacgctctgggctgcagcaggagataccctcaagcacagaaccaaaagggttcaccctaagcggcagggcatcagcgatggagaggcccgagagccctagcgcccagctccttttcccacgtttgggaaggcgcagaataggtcgatgtagagcaaggagtgagtctcaggtctcagtcctttggcttgctcttagggtagcaggcgaggagtggcaccagtttggggactctctccccgcgttctgtaagaatcggcggcagccagcaggcggggaggcgggggcacgtgtttggatgtgggtgcttgtgtaaccagttccccaagcgccagccccgacagcgctccttcgggaggctggtccgagcccctgtttccgccgcggcgcaggaagggttggggttccgctgcctgcaccaggcaagagcaccccgagcaaaggaagaagacgacttgcctccggagctatcactggggagtgggaatttggaaagttccccaactagggacacacgtgacctccttcggaaagtagttccgactgtggcccgtgtatccttccacctccttttgaaccctcctaggtctcctcgccccgcccactcgctgggctgcagcttcctaccgttccgtactttccactcaacccggtaaccccaaacgtgcacggtccggccggggcgcgcggagcctggccccgggcgatccatcctgccgggttttcacggcggccaagggggggcggggctaggtggtctctgagaaccgagcttgactccgacgccgcgaaccgacctggagcccgaggggaaagatgctcgactctcttgggggcaccggagcgggcgcaggagaggcctgcggggtgcgtcccactcacagggatcctctttcagttcatttagataggtgccctttgggcccttgaaattcaacggctatgtgttcacgttcagcacgctcggctgagagctttcatttttagggcaaacgagccgagttaccggggaagcgagaggtggggcgctgcaagggagccggatgaggtgatacacgctggcgacacaatagcaggttgctctttgtgctaagactgacaccatgaggacacagatttgggggaagggggaatctctaggcaaaggctgttacagtcaaatctctgcgaacgattgtgatccgacagcggtgcaaaaggaaagagcgaatgcagtccacgccgcggaaatctaggggtagaggcaaggggggagggtattccccttgcagggaccgtccctgcatttccctctacactgagcagcgtggtcacctggtccttttcacctgtgcacaggtaacctcagactcgagtcagtgacactgctcaacgcacccatctcagctttcatcatcagtcctccacccccgccccacaacagcctaccctgcctccggctgggtttctgggcagaggccgaggcttagctcgttatcctcgcctcgcgttgctgcaaaagccgcagcaagtgcagctgcaggctggcggctgggaaccggcccgagcaagccccaggcagctacactgggcatgctcagtagagcctgcggcttggggactctgcgctcgcacccagagctaccgctctgccccctcctaccgccccctgccctgccctgccctcccctcgcccggcgcggtcccgtccgcctctcgctcgcctcccgcctcccctcggtcttccgaggcgcccgggctcccggcgcggcggcggagggggcgggcaggccggcgggcggtgatgtggcgggactctttatgcgctgcggcaggatacgcgctcggcgctgggacgcgactgcgctcagttctctcctctcggaagctgcagccatgatggaagtttgagagttgagccgctgtgaggcgaggccgggctcaggcgagggagatgagagacggcggcggccgcggcccggagcccctctcagcgcctgtgagcagccgcgggggcagcgccctcggggagccggccggcctgcggcggcggcagcggcggcgtttctcgcctcctcttcgtcttttctaaccgtgcagcctcttcctcggcttctcctgaaagggaaggtggaagccgtgggctcgggcgggagccggctgaggcgcggcggcggcggcggcacctcccgctcctggagcgggggggagaagcggcggcggcggcggccgcggcggctgcagctccagggagggggtctgagtcgcctgtcaccatttccagggctgggaacgccggagagttggtctctccccttctactgcctccaacacggcggcggcggcggctggcacatccagggacccgggccggttttaaacctcccgtgcgccgccgccgcaccccccgtggcccgggctccggaggccgccggcggaggcagccgttcggaggattattcgtcttctccccattccgctgccgccgctgccaggcctctggctgctgaggagaagcaggcccagtcgctgcaaccatccagcagccgccgcagcagccattacccggctgcggtccagagccaagcggcggcagagcgaggggcatcagctaccgccaagtccagagccatttccatcctgcagaagaagccccgccaccagcagcttctgccatctctctcctcctttttcttcagccacaggctcccagacatgacagccatcatcaaagagatcgttagcagaaacaaaaggagatatcaagaggatggattcgacttagacttgacctgtatccatttctgcggctgctcctctttacctttctgtcactctcttagaacgtgggagtagacggatgcgaaaatgtccgtagtttgggtgactataacatttaaccctggtcaggttgctaggtcatatattttgtgtttcctttctgtgtattcaacctagggtgtgtttggctagacggaactcttgcctggttgcaagtgtcaagccaccgattgctttcttaggctatctatatggtctcttcctgagggctattgtccgttaatacagaatacagtacactgttagtggattagcgagctcggtaatccggtctcctaaatgaacaaaaaagtagacgctttttgaggttgagcatatttcgattaaatcttggcttaggccctagatcaagggtttagatcagaataaaatgaaaattagtgttgcacgtacgcatattgcatcagaatcttgcagtgattgttttagtttcctgagttgcattgatagattcttttaaaatatgactgatttgcataactttagaagcagaatcattttcagtatatatggtgcacattgagggcaaaaagtagttttgttaatgtttaaacttaagttacctacaactttgaactgtatgtagaagttttgtagtttgaagtcaatagtgccataatataccttataaggcgttcttactagatctttgttatatttacctttttctctccctatggggtgatgtaggatagtgcttgaaatttgcacttcagtagcatttaatgttcagtgctcttgtcataaacatagaatggatattgagtagtttctgatcccagatggtaatgtgtaggttcaagggtattgtgtgtagcaagtgaagattgcagaaataaaacttcagttcatgcttgaaatttaagtattgttgtgatgccagaattgctgctcaccgtttttaggtttcaggtcctctgacaccttttggtatcgttaattttactgatttgtgtagaatgtcagttgtattttaccagctaatatctagaaatgctggcaagaggggtttactccagctttagattgtaggtatgttagcttttttcatacagtgtattaaatttactgagtcagcttgctgaataagacagaagcccaagaattttaacagtgtgtagctttagttgtctaaaagttaggccttcgggcttcaaaagttagtggtcatcgaaaagcattaatctttgcagtttcaggtacaacacattggttttgattagggatggggatggggccctctttttgcagaatggggaaagtattgacaggaattgagagctattggtaggccagtgtataaggtatgtgaaaacagaattaagttattggtctgaagtgactgaagcatttaggctctatcaaggcctaaaatttggtaatatgagtttggtaatgcgaattgtggcagtggacaatatttagttaaaattatgtaattgcataagtactagcacagtatttttaataaaagttatttcttagcaaatgtcagttgcattttgtctaaaggtagagtgacactacagtgtctatatgtcctgctaaaaattgtggggaatatttttttttaagacagcgtttatatcgggagaggttttattccgttggattatgttagctgcatataaatgtgcacagttaattttgcccaagtttttgttttgaaatgaatgtaaaacttactgaagaagtagcttcccaaaatttagttttctgttaagccaaaaatattattttaaaagagtatttgcaaattttgaagttgacattaattgagaatgttactaaggctaaactggacccgcttgcccagaagataattatggaaaaattcttttgtgacttccaaagcagtctactattagcatgaattactgacagtcatccaaatatataggaacaaaaaattaaatgtttatgtaactttgaaaaaaaagcctttgaagaaaataattgaatgctgtctgggagacagatttctttcagcacttaaagtacataacacactacttttacttttcccacttgattttaaattatcagggttattaagaccttaaaattattttaccaggtttttacatgtgagctgtgacatgactggcattttctttgatttcagcgtatgttggtctctacacatgaaatttgtgtgacttaaaactttctctaaaactgtacttttagttatgatatgcatagaaagcagtatcaaatattgcgtcaaatgactaataacacttaatttctagagttgtggttttattgagccaaaagttgatatgaaaaaaagtcagtaaggaaagtcagtgaagtgcttgcttttttgataattgcactcccaataattttgatattccaacgtacttggtttgcttgttttcacgttaatgttttctgtttattggagtgggaaggcattaaaattgtcattgaagactttgtctttgacatgttgtagtatttatttcagtaactaacctgtgaaaagttaaattcctttatgaaagtagtgattggagtatttttatctgataaagaaagattaataatgaagccatttctccgaggaaaattgaggacaataattcagttttaaaatattatcgcaaaattaaattattctaaaaatttgttagtagggttatatgcttaatattagtctgaaatatagtgctgaatttgagactatagaaaaattaagtgtatttagggtatgtggaaacgttaggcttctgttgtatttttattgtttggtagatttgcctcttttcaaataaatgttcacagggaatacttttaacttgtagagagtacagtgactattgaagttacctaaattacctcaaggtaagtgattactgaaattaatcatgagggttttaaaaagtattctattcacaacatttattttacattgttttgtatctgctaagttatatttcctgaaaaacatgactggaccacctaattgctgtatgataacttacaaacttcatttttcatagtgcttattcaagtgtaaagcacaactgaaaggagtaatgtacagtttatatgaggaaaaaggaattttattgctgccagtgtaaaagtttgcacagcagtatagtcatcaatgcagatttacattgcttataatatactaagtaaatactaaatgattaaagataataaaatatggtgaggtataaccaccttcattttaaacttagttttagaagatagtaaagaaagattcctttattacctttttagaattttatttttaataacatgggaaaggcaactggtgatattttaatttttgtatggaacagtgcatctgctttctcatagccacataaaatacataaacttcttagtgttatgaaatggcttactttttggaagtgaagaagtcttcaattcttattttctaatgttattttgaaatttgcctccatttgctgtttgttcatttggtgatagcgcaacacttaaaaaaatattttaagccgcttctgaagtaatcacttcagtgacttttaatggaggagtatttgttatgggaaattcacttcacaaagttttaacattaattcacttgaagtaaacgtgctatttttaaattttcatctcaatcttttaagtaagacgaaagcttaggaaatcacttttattattgatattgtgtgtgacttcagagtttgtaaagagaattgtagaagtgttgcatgcatatgacaattttctgcttaattgaaatgtgaggcctctgccatactacaaggatttagcttccagaaaatgtaatattaacatagcttaagaaatgtatttttttttttctgtagaaaccgttgggttaaacaaacagttcagaagttttattacatggaacccattagttcttaatcttgttacctttttcttcattttttctgttaaacttgattttcacagtcagcattgaagaattcatcttgtggcctgaattcattaagaaaagatgttaggatttgttctgaagatagtgacttaggaaatttgtgagactggggtcagtcagttctgttttacaattgctttctatttggtagctttgaaattaatttagttgcttatcagagagaataatgttgaggttagactaaccttaaattggtaaggctttgctgagcaaactgataactgtaagtcttttatagggtgcattactgccacatatacgttcttccataggtggttaaaagtatattggtctgtgtttggtgattctctttgtacatattgagtatatgcattcactaatgtaaaataatttgccaagaaaggtgaaattagtatattgtacttgactattcacctttcccttagttttttgaatttttttcattggttgcagaggaagtattagcaatttaattcttttaaaataatttgcactggaataaataagtatcggcaaatataagaagagtaacataatttaagggtgaattaattttatttgggaagttttagttctgtatagttaaggcagattcttcatttgcaacagttgacattgggacatgtgtgaacatcttcaaggtattaggacatcttcaaggcattactttttggcagtgttgagaatttttttttttttttttttttttttgagatggaatctcgctctatcgcccagtctggggtgcagtggcaggatctcggctcactggaacctctgcctcccaggttcaggcgattctcctgcctgaacctcccaagcagctgggattataggtgcatgccaccacgcccagatagtttttgtacttttagtagagatggggttttaccaccttggccaggctggtctcaaactccagacctcaagtgatccgcctgcctcggcctcccaaaatgctgggattacaggcgtgagccactgcgcctggccagtgttgagaatattgagagatggatattgtagctgtacctgccatcaaaagaattttcttgacctccacatagtgtgaaaaagaagactgtttacacattatattttaagtaattatacacataattattatcagtactcaccacttcaaatatgaacagtgaatctaaccagtgtttgatttctctgtgtgtgtatgtgtatacaaagttagcaaaccttttatcttaatatttattaaaaaacgaatttttgtttctttaaagaaaagactaccttagagaatattgttctatagtttttaaatatggtcagatctattttaaattatgttaaaattttgagtattacgtttatctatacttttaagcatatatacattgtttcattttagattttagggaggcagtgtgggctctggagccagactgcttgttttgtaatcctggatcttccatttagtagctggatgactttgagtaggttatttagattttctcaatctattttatctgtaaaatggggatgataatggaacctaccgcatacgtttatcttgaatagtaagtgagataataataagtaatttcatttagcatagtacctgccacattgtaaatacttaaatggtagctactgctctgaaaaactgtaatttcaggttatgtatgtagggaaattatttgtattttcatttatggtgtatgattgtaactgaatttcctcagtttgggccatgttaggattttgtttcaagttataagtgtttttaaaaataagggtattcctttaggaagtctgggtatgacatgtctgtgattttgctggttcatcacaaatgggaaataaatctctgctaactcaaactgttgaccaaagtaaaattaattatgccaatcaaaaactatttgctttaaaatataaaaggcaaaaacttcctattagcataatgaagtagaatttttaaactttgttataatcttaaattttctttagtgttgaagataggtcaacttaactatcatacatttttattcacataaagtaaactctgcctcaaatgtaataaacttaatatgagttatgtaaactttggtcaatagaggtatattttttagcatttccttttgaaaatttcagccttttgagggagtcttgcaactgaatgtcaagttacatttattacaataaaatggacacttaatataatctgtaatgcattaacataatatgggaacttttaaagtattcagtctctgtattattgagtcctatttccacatttggccaggattctcaatatgatttaggcccaagacgtgggaagaaagaagtaaagaactaaaggatttttttcttcatttttttaattgaatatggggaaagatggaataagcttatctgtccagtaaaggccattatgtgtacatagggattattatttttcccccccttgggctgtactgatttcccagatgtaccacagcactcttagtagtgaagcacttgacttctagtgagtggattttttgtgtgtgtgttttatattgcagagtgaatacactctgtctgatactatgtgactttctgattatgtgatttttatgcattttatgtgttttgtaaactagctgtatttttggtccatgtctaggttgtagaattgaattgtgcattttggcatctgagcacagctgagttttctaaatcaatctctctccttgcacctagtttttgctttagatcactacctaagacttactgttgatttaatattagagcacttaagcatagctttgacttttatttcctttgatttttgtagattttcaggctgaagtacaataaggttctctgttctttactagtaattgcaaagattgtattctgtgaattttatttgtttaatacttttgatcttttgaagaggatgtaattatttaaggtattatgaaatgcattgtgatttgaattagatactctttggagatggagttttgctgttgttgcccaggctggagtgcaatggtgtgatctcggctcaccacagcctccgcctcctgggttcaagcaattctcttgccgcagcctcccaagtagctggaattacaggcatgcgccaccacgcccggctaattttatattttttttttcagtagagatggggggtttctccatgttggtcaggctggcctcgaactcttgacctcaggtaatctgcctgtctcagcctgctaaagtgctgagattacaggcatgagccactgcgcccggcctcagatactcttttaattagatgcgtttaaaaatttaacccaccattgctggcatgaatagatgtatttttagagtgattcataaatatcgtatacatgtttaaagttacaaactttttgcttatttcaaaatgcaggattcttttccatttaaaattccctctctttgtgagacttctttttgagtattctggttactctaaactgattggagatgaaattagatagaattgaaaactgtacttttaaaatgaaattttggggatgtcattaagcttgattttttaggttttttttttagtgtgtattataaattattttacactgattgtcagcgataaaatggaatgcctgggattttttaaaatttattttattcatttttataaggtaaaaacagtgttttgctaggcttaatttgaccatgttgtaaaatttattgtataccttgaaagaatcatttatgaaagatactgaattagctaatatatactctgtcttatgtagtttttgattaacaatacactttttaaatcattagctcatttgattttgcaaagaagaacaggtaacctaagaggcagacagaacaggcattacttttatttttctttcttttttattttatttatttatttatttatttattttttgcagcttaggaattgtagctccagtggaatcagtatcttgttaatggctagtgaaagactgagtctgaagaaggatgcaggacttttttggcacttggtgcagtatttttcccattatgttacatgagtggttcttaaacttcagtgtgttagaacaacctgaagggcttattaagctatggattgcttactccaccctcagagtttctgattcagtaggtctggattgggacctgagaatttttatttcttagaagttttcaagtgatgctgatgctggtgctctggggatcacactttgaggaccaccaatgaacattatctcccaccaagcaaacccttaacatgttatactcctttaggttattagaatttatacatgcattatttcatttgacctgtaaactctaagtaactttgcatggaaaatgttatcctgattttatagacgagatagtgagtttagaaaggcagtatggtggaatggagcatagatttggagttggctagacctaaagtccagattaaatctctgctcaaggctgggcgtggtggctcatgcctgtaatcccagtgctttgggaggccagcgttggcagattgcttgagtctggaagttcgagaccagtctgggcaacataggcagaccctgtctctacaaaaaaaaatacaaaaattagtcgggtgttatagtgcgcattggtagtcccagctactgaggaggctgaggtgggatcacctgagactgggactttgaggctgcattgagctgtgattgggacactgtactcctgcctgggtgacagagtgagaccctctctcaaaaataaataaataaatacatccccgctcagccacttatcagttacgtagatacactgcctaaccttagtgaaccctgtttcgacaactccaaaatgggagtaaaaatcctaaacttgtacagtggttttttagttttgttaaaagtacaggtgaggtttttttcagagtattggttgccatctgagagtgatcccctttcacctcctctaggacttttagcattttctggagacattttggtggtcacagctggggtggtagagtgtgctattggctaggggcttgaagccagtgatgctgcttaacatcctatatggcacaagacccctccccatcaacaaagaattatctagcccaaaatgctgtgtaaaatgtctggtatataataagtataatatttgatgaaaatcagtacctttgcccccaggtgtgatatttaagaaggtcaacttactaaatcagtgatggagttagtcctaacatctgggtgttctgactgctgctaggccagtattctttatatgataataagaactttgtccacagaagatatccctaataacaaaaaaggtttatttgaagaggactcatgtgttctttggctgattgtgaaagtgttgctttgaacttctgttagaaaaggttgaagatgttttccgtaagtgtttttaatactgtacgtagtattcagaaggatgtttaattttttttttaattttgctagtagtttttaaagtaatcctttttcctttaattatgtagttgttgaactgttgggagttacttttctcttactattttgttatttaatgtattctttgaccttatgcttttttattctaaagctgcttttattatagtcagatatgatgaagttaaatgtacaatgtaaaattgcaaatttccaacgagctatacaaacttaaatatttctaagtaaagaaaatagggctgactctaaggttctttgatccatgtgttgcattcttttctaggccctaaatttgctatgccagcctgttgaattaaagtgctttatttatctaaattagaaacttgtattaaagtgaagttttagaaaaaaagaaacaaaatcggaatggagttttaggttagcccagagatgggaagatgccaagaaggtagctttagtggattctgaattttttggttttgttttgtttttagggcaggcaaatgtaattacaaaagggttctaggaatagattgctgtgattttttttctgtttgcatgattttacagtttgctttgcctctcacttttgaatgcagaataaaatgtcaaggccttatttttttttaaattcttaagaaatttaagatttgactgttaattccttttgaaatatgggatattttgagataccaattatttaagacaaataggactcattgttacaattcagttgaataaggcttatgatgtttatttcagtatatgaatgaaaactatgtgcttattgtacttaagaaaatttcttttattaaaaacatgactaaagagaattttaaaaatcacccactgtcctacttctctaaaacttaatgttttcatattagcttccagttttgttcatatgcatatactttaaaacctagttcatggtgaacttaagagggtgttctttttaaaaaacaatttccattgcactttgtcgttgccttaattaaatggtgaaatcatcagaaatatttattttcctatacttatacatttattaagcttgtttccatttttttattttgtgattttttaagtggatttaagataacctaaacattagagaggattttcatggttttgattcatgaaatcataatgttatacaaacctaactgaagtgttagagccttgaagatttttcccccgaattacatatagtaactctacttgtatttaatactgaaagcatattttacttatttaagtgagacaaagtaaaatttagctgaatactttagatctatcatttccttttcctgttgtaagaacattacattgtgttgaaattaaagtggatatagaaggtaattagaataaactgccacatcatttttatagtaaagtggtaataacactattgctttctgtttttttaatcagaaggagtatgggcttataatgatgttactgttccctgaagcatattttgaatgatacggtttatatttgcacagttgcccaggtaatcattgtgatattaattgatcaatttgctatttatttgcgttttaaatcagtactagtatttgtgcttaaaaattttgcatatgttttatcagatttaatttttaagtgtcagatactaaaacaaataaccttaactttattaaattataattttttatcatgaggtggtattcatttattcatatagttagaacaaaaaatatttaaaatattgaggtagaaacaaattagtctctttttaattaaaagccagattacttgttagagtaacattttcccaaatgaggtaaaattgttgcgactgttaaacttaaggaaattttgatctaggtgtggtatataccttcttgtggggtgctaatgaaaacagggatggcaaaaatattttgtttgtgagtgtatgcatttatgctttttgacaacctaagaaacactcttacatctgagtatctttcatggactagctgtaggaaatctatataaaatagcttagtatactgaaagtatgacatagttttacatatctagattgtggttgtgattatatataatactataaaatatgctaacgtgctgcttaataatactatttggattttttttaatactgaaaaggtcacacagattgtgattattgtgtagtgtccaagaactaaggcctaccatctgttactcaaatgtatgaaaaagttaagataatttagtgatataagtggttttgacaccactgtttttggaataatctaattatgatttttataaagactaatatcaaattttaaacgtttgcaaaaatgaaacctaatagttatactgttatttatatttttctattacaatacagatactggctgagaactaaagattgtgtaataaacgcctggccttcagtcatttggttttttttttccctcgattgtttggatagttaactggacatcatgttttaacttgagaaattaagttatacaagattttgatattttaaactagttttcctaactggttgagatatataagaatttagtattacaggactcaatcagggaactgatttaataagaatttcttaaaaatttgtttaaatatttttcaagttcttttcttcatcttctacaacttaattcttgtctgtatgcaaatgagcttccccatttaaaattttgctgttgcattttaggccactatagaagttgtttctttaattttcactcacaagaatttggtcttaccaaattgtgtaaatctttaaaattgtgtatttggcttaatattatagaatctgattgatttaatctaccttgtttcatttagtatgttgacattttcttgagaaatttgttatgccaaatgattaacataataatattttaagtttagatatgattttgaatttacattttcaaatgcaactttgtgtctgtggccttttttttttttttttttttacgagaaacatcttgccaattttcagattaatctgtgaggaaagtagattggtttactagactcagtttgtagactttggtgagaactgaattggaggctatgaaaaaaataccttttgggcctttctgaatagacatatatacataaattatatctcttacattaagtgaggcacatatgtaggtgagatttttacctgaatattaaaagtttaaaagtcgttacctattctgtttacttaatagtatttaaagggtgtgagaggtgttatgtgtttctgtcccttgtttttattcctatccctcccatctaactgttggtactcttatcttcccaggtattaaacttgtatgttttaaaagcttatttacttgttgaaatggttaacttaattagttttttctttgaagtttcagcctaaatattttctgtttttttatatgtcctttaaatatgaaaattctacagctaatcataattagtaattgtactttttcccctattacaataactggtttcataataaaatggtatcccttcaataacaagcatttatagtagtttattaaaactaagggtgttatctattcaaaccaagcaatgcagacttactgttgactctgttaatatattttaaaattgcatattactaaaatttaaaatatgattttgactagtattttggtgtatgttattttagatattttgattatgcactacttaagaatgaattgtcaagtatgattataaagttgatataatagttaaccttcagtgggaataggaatcatttaatattgttagatatttgtattattagaacaatctcctatgattcttactaatatagtaatgaatgacagacaatatgttggctttcatatttaaaaattcacatgcatttctagtttatgtttttcttcgactaaaattctgcagcacttaggcaaagctatttttaccagttggaaaaaaagtaagtcatttccaaccaattttcctggcttgtagtatagaataaagagacttgattttattacattaaagccaaatataaaatgatgcaatctagcacacacttgtttggaacttttctcttttaaatattcagattaagaggacgttgaaaggtaaatttttttttttttttgagacggagtctagctctgtcacccaggctggagtgcactggcacgatttcggcttactgcaagctctgcctcccaggttcatgccattctcctgcctcagcctcccgagtagctgggactacaggcgcctaccacggtggcgcccggctaattttttgtatttttagtagagacggggtttcaccgtgttagccaggatggtctcgatctcctgacctcgtgatctgcctgcctcggcctcccaaagtgctgggattacaggtaaattttgattgttattagcaactataaaagttttgcagttggcttattggaaaaagaaaacctccttgccggagacggagacgcatttgtattagaactttgttttctgagtaccttacctatagtaggtttcaaatattggtgaattagttgatggttaggtctgcataattactgcgtatggaaattctggaaccctattttttcaaaatgcagctaatgttgagagaatatgcactaaatattactagatctttgtttttcaagatgctgatatcccttaacatcttctgcactttacctgtttgaatatcttttttgctgtaaaaattagtggccttatgtctttctgcataattatagagtagccaaaacctgttttaggttaatcacctctggcaaaataaatgataaaagcatagcttttgtaagcagaatgatattacagaagttaacttataaatctaagtgtattaaagacacttaggaaatttatgataatgctgggtcagcattacagttttaactttttacagtttttcatatgctttttttgtgattttgctgtagaaaattaacagttggcatttggcttagttcaagtataatgctgttgacaagtatatctgacacgtcattgaactaataatatttttgaaagctgataggtaagttatatctattttgtttcattcgtcattagtgatcggtcttagatgtttttagcgagagcaaaactgtagaggaatgtgtgtctgtgtgtgtatatgtgtgtgtgtgtgtgtgtattttaacagcaggagagttctgaaacaggaaaccagtcttatcatattcatccagagacctaggaagaaggtaattgtttggtatactcgttaaaaccagttggttgggcaacttaaatttttagaggatcacagatgtaggcttgagcagttgtagatagatgatttctttttttttctttcttttttcttttttttttgagatagagtctctctctgtcatccaggctggagtgcggtggcgcgatcttggcttactgcaacctctgcctcccaggttcaggcgtttctcctgtctcagcctcctgagtagctgggattacaggcgcatgctgccatgcccggctaattttttgtattttagtagagacggggtttcaccgtgttccccaggctggtctcgaactcctgagctcaggcaatctacccacctcggcctcccaaagtgctgggattacaggcgtgagccaccgtgtctggcgatagattatttcataattaacacctgctatgaagaaaaattgattaaaatagttgagaagtctagtacactctcagctaatatactaaattatactatggattttagagtattgttaacattatcagtgacttgatatcttcctgaggttctaatttgcttaactttaaataattggggttcagatcaccttgattgttcccttaaagattaaattttgtaaaactgtgtgtaattttcctgtatctggtttggatagctttaaaaatggttcttaagtttaatgagttcaactgggaaaaaagttagttctattttagatgttgtgtcactggaaattatgtttccctgtttgttatatgcacattattacaaagttgtaatcaatgttttcatactgttctctggtctgtttttttcacaaatacactttttatttgtcgccaggtacttatttttaaagctatagaggtaatatttcatcaggtgagggtaactaccatggtttgtttgctatactgtgttagggttattttcgttttttttttcttttataaactatagttgtgaatatgtttatgtagtttacttttggtttattagaatatattgctagagtgggattacaggattaaagagtgtacagtattttagttttttttttttttttacaagttgcagatttgttgccaaatgaacgagtttgtagtattgctaacaaggagaagaattactagcaagtcttgatgttacttttgaagagtgtgatgattgcatttaggaagatatctaaacttctgtttcaaagcaaaaagtatgtgcaaatttcttactcatgacaaattcatataatataaaaacatgaaagttgtgaggtcaggttgtttggagaagtagaaaacttcagtagagtttatagataggcagtcttcctttctggtttggcactgacagcagattaactagaaagtgttagaaggaacctaaaatttatactaaagtcaatttaagttaattaatataccagaattccttcttttacaatttatttataaaaacaccatattgagttgccttgtaatgagacatttaaactaaatttaaataacagaattcatgcaccatctaataacaaccccttatttacaattatagagtcctttgcaattttatagatattttcatgtatcccatttggtccttgaaacaattaatgaagaagttacagcaagtggtattatcattattttacagaagaacaaaacaaaaatatatgtggcccagagattgagtgatttacctgaggttataggctttagattgcatagctggaagtagaaccttgttcttctatattaaatgacaatattcattaagtacttagcacaggatttggtacctagtaaatatttaaatgttcctgtgttattcctgactattccttctttattcttaaaacgccattttttgagcactcttaatatttatagttcaaactttgtacctatgtacctttttctctttagaaaataagatttcaggctgcattaatttgatctgtacaggaatgattatatgttttacatattgggacaaattgctctttttttatataccttaagctctagggtacatgtgcacaacatacagatttgttacatatgtatacatgtgccatgttagtgtgctgcacccattaactcatcacttacattaggtatatctcctaatgctatccctcccccctccccataccccatgacaggccctggtgtgtgatgttccccaccctgtgtccaagtgttctcattgttcagttcccacctatgagtgagaacacgcggtgtttggttttctgtccttgcgatagtttgctcagaatgatggtttctagcttcatccatgtccctaccaaggacatgaagctcatccttttttatggctgcatagtattccatggtgtctatgtgtcacattttcttaatccagtctatcattgatggacatttgggttggttccaagtctttgctattgtgaatagtgctgcagtaaacatacatgtgcatgtgtctttatagcagcatgatttatactcctttgggtatatacccagtaatgggattgctgggtcaaatggtatttctagttctagatcactgaggaattgccacactgacttgaactagtttacagtcccaccaacagtgtaaaagtgttcctgtttctccacatcctctccagcacctgttgtttcctgactttttaatgatcactattctaactggtgtgagatggtatctcattgtggttttgatttgcatttctctgatggccagtgatgatgagcattttttcatgtgtctgttcgctgcataaatgtattcttttgagtagtgtctgttcatatccttcgcccactttttgatggggttgtttgattttttcttggaagtttgtttaagttctttgtagattctggatattagccctttgtcagatgggtagattgtaaaagttttctcccattctctaggttgcctgttcactctcatggtagtttcttttgctgtgcagaagctctttaggacaaattgttcttaaataatgaacagttggcactttttcaactggaaaattcaaggaactgctctttctgctttctgctcaatatgaatcttcaatttagaaatgagagtccatcattaacaattcaacatagcttattaataggaaaaaaaaacctagtaacaaatgtaaaatctttgattaaatgagaaagtcatagaagttcatcagatttgtatttaaagcatgatttcattagaaaagttgataataaggatttaactgtgacataattggaaaatacttgtttaaacttaaaattttgaaaagaaatgtaaatgtgatgtaacttatgaatcagtggttgagtttcttttttgctcacaagaaccctaactgtgtgttacttgaaagcactgatggaaatcagggaaaaagctccagaagttcctacgaaataaaattaaatgataaagtcctggtatctgctaacttgccttccattcctgttatcttttcttcttagtctgacttcattaattctttcaccctggctactggtttagctcagtgttttatgagccaggcagcttcagactttgcttttgatgctctttgttcattacctctaaagctgtattatcactttcattttatcattaatgtttcatgtatatgttatagtttcatattgttactgcaacttttacttagctataatttaaaaaatatctgtgatctgtggaaataattattctatggcagaaaagtagttattgcattttactttataagttgtttaaggataagcatacctatatattaagcactacaaagaaacttttacaatggctttatttttagcaaaccatcatagttaaaataagatttagtgtacatgtcaggaacacagtcttatgaaataaggtttagggagctatttttagttactatatcctacttgaaaattgtagttaaatttctagcatataccctattaatttagatgcaagtacagatttgagataaggtagatacattatttggatgtcaactcggaagttgttcaagaaaagatattttgttatttagatgtaacttggaacatatttctagtgtttcaagtcatgattgtatgcctagaacaggcaataaaaatttacttagctggtaaaacagccacattatttcaaatatagtttagttatattatggattaaattgatttttgtggacagactttagaacttaattgctattaattacattttttctttgggacggtatttgttctttggtgagaaaggattcttgtaacacctaaatcaagactgtccaaacatggcatatgcagtttaccagtcaaaacaaactaatcacttaagatctgtgtattttgttttatttgaattatacctcaattaaaacaaatttagcatgtttacacaaaggtggggggaaactgtctaatatatctgagatctgttggagctggggtgaccatccaacttaggcaagatagctagtaccatgtatgcatttcttttacctttcttattgtatatacagtaatcactgatattatgagaaaaagaactttttaataattcaggagatattttatcgctagtatatattgagtgcttattatgtgccttatatactttggactcatttaatcctcaacacaacaaccctatgtagttcatactagaattattcccatttaaagatggggaaagtgatgtttagagaggctaagtgacttgcccatggccaaagtattagaactgggatttgaacacaggtagcctgattcctaaataaatgaccactaacattaaaaagacataaacatagaggtgtttgttgcaatgttagtcataatacctaaaaattgtgaactagttaaatgtccaatagtagtaaaatggttcattaaccatggtacacccatcaatataatgttatattgtcatttaaaattgtattcccaagtttcgtatcaggaaaatataataaatttttgaaaaatgtaatgggatatattgtatttataatacagtaatcactatgtaaccaacatttttatttccatcaaaaattagttataaagaaatagaaatctaagaagtttaatagatattaccattgaacactagatttgtattagtatcttttatatttatctctctcatttcctatattggccatgtttacttttaaaatagtaaaagtcataagctctattttaaaaataaatgttagtttattaacccaagaataatagctaactataaattcatatttgataaaataaaaagatgacattcatcataagggatacatacctgtgctagcatatggcatttttaaaatcacatgagtaatttgtaatcatcatagaaatattagaaaatacaaataagcaaacacatactgaaaatttagtgttcccaaatctaaaacagagacactgtttttttcttttgggattgtattttagatatgttcttaagttataataaagtaaatacttaaaaggcaaattgatacattaaggatttcaaagagtaaaactttttgttaagctttgatgttctttagaaagtttagattattccacaagtcactgtcgttgaaagaaaagtagttacagtggggtcttatgggataaggcattaccatttgttcagttgagagacagctatcactatgttttaagcattgttcatatattagctcatttaatcctcatagcaaccttatatgataggtacctttattagccccattctgcttaggaagcaacagaaagagtatgtattttgcctaaggttgcacaataagttaagctggggttccaattctagcaagttggttctagagtgtatgttattaaccattatgccgtagtgcctgcaagtagatctctagatgtcagaaatactcatcttcctctggttacctggttgttataaatctttatgcttaatacttatgtcattatatgtaaatttcgtattaaacactcaacttattcagaagaatatcaggtaagtgtaggttaaggctgttttctatcagaaatcattatatgtatatatattcctcagttcttatgttgtttagtttttctaaaatgtcaaattttataatatatggagaagtataaatgtatattagaaagattttgtttatttgtgtaatttgtggcataagaaatatttgcctcaagatttggtgcttgtttaggtagttgctggcattacttttggaaatgtcagtaaattttcatactgtcttggaattttttcaatttttacattttattagtaaatgtaattacaggttagtaaatcacttatttgaacctgtttcctttgaaagttttatatttttatttggaaatagaaaaaccttaatttcctctcgttgggcagtatggtgtcaaaagcttgggctttggagcttcgtatataatctgggttcaaattataacttactagttactaacttgggcaaattacccagtctttttgactctcaatttctttgtctatgaaatgtaatactatttaggattgttaggattaaatgagaatatatttggcatactgtctggtacatgatacttaacaggtactagttgtctacatctttctaacttaggatggatgccgatgtcttgggtaacatctcaaactttatcagtaaggaaggtgagaatctgaagaaaatgaaaccttaaaaagattgaattcctggactccatttaaaggagtaaatagctcacgaacaagacttgctgctctgcaaagtcttccatgttgatcctggtctttgactccttatctgtctgattaaattgaattcgctgccgtggcatccttaaagctggaccttactttgtcagtcctgccttctccatgttgctttgtgtgtaagcttcactggactgtttgctttttgctgattattttatgtatttccatatgtctactttagcctttgcttggaatgttctaactgctcttgtttcttcctctgtttactggtttctgacttaactcttaaggattatctaatatattacctacttggtgaaggtttatctgtgtccccacagaattaatccttccctctttaactcttaagctatcttattttttatctaatcgggtctttggcacaattataggtctgtgtgtctgtcttccctaatagaataggaaagccttgaggacagtagtctttgcttacttagccttatattctcagtgccccttgtgcaaaacgttcaatatatgtttgaatgattatgtgaatgaaggagggggccagctgaatttactttaatgattatgtaacacccatttatgtatagttatagacttgtctgaaatgagttaaatcctttgcaacgtttgctgctatgctttgaatgtctcttacaaaactcatgttgaaatttaattgccattgtaatggtattaagagatggaacctttaagaggtgattagataatggtatctctatccttatgaatggattaatgctgtttgaatggtagtggatgagttatcttgggagtttggcctcctccgtctcacatgcttccttaccttctgccatgtggtaactcaacacaaagatccttgccagatgctgatgccatgctcttggacttcccagtctccagaaccgtgagccaaatacatttctgttcattctaaactacctgttttgtggtattctagtaaagcaacataaaatttactaagaaaactggtaccaagagtgtgattgttgccataacaaatacctgaaaatgttcaaatggcttgggttctggctagagaaggatggaagagtttggatgaacaggctagaaaaagcctgtattgctgagaatagagcattaaggacaattctgatgaggattcagaagaagagagctgtagggaaaatctggaacttcttagagagttgtcatcagttggtagaactataagtggtaaaggtctttctgatgatatctcagaaatgaagaacaagatactggacactggagtaaaggccatccttgttaaatagttgcaaagaacttggcgaaattatgttcatatcctaagactttatggaatgcagaatttaagagtgatgaactaggatatgctgcagaagaaataactcagcagcagagcatttaggttactggatggctacttttaaccacttaaactaagctgggggaagggaatgacttgaagacagaatttataattaaaagagaggcagaatggaaatacttggaaaatttgcagcctggccatagtaaagaatgcaaaaggtatgtttaggagagcaaaccaagggtgtggtccaggaaccatttgctgaagagattaatattcctagaggagacccaagggctatttatcaagacagtggaaaaagaccccagaggcattttggagatctttgaggctgcctgccccatcacaggcccagagctctaggagggcagaatggtttgtggctcaggtggtccttcacaagcttgctgcccagggctacctcagctccccatatttcaacccagtgggccttggctgtcctaggtctggttcagaggggcccaggtgtggcttaggctactgctgagtactcaaatggtaaaccttggcagcgtctatatggtgctaattctgcaggctcacaggatgaaagagctgtgggagacatggctaccaccaccaggatttcaaaggatgatggggatagtctgggagagacttgccacaggcttggagcctctgaagggtggaaatgtgggttggagtcactacagagagtccctactagggcattgcataatggagccatggcagcaggcccaccaccaaagcttcagaactgtagagctacaagtatacagtgccagcctgggagaacttcaggcttgagaccctaacctgtgaaagctgcatgggctaagtacagcaaagccatggaggtggggcttcccagggtctattgggatgaaacgaatgtattttgtaggtgagaaggacatgagttttgaggcccaggggcagaatgctatggtttggttgtttccttcaaaactcatgttgaaacttcattgccatgtggcattattatgaggtggaacctttcagaagtggttacattataagggctttgccttcattaatggattaatgccattattgcaggtgtgggttagttatctctggagtttggccccctttttctctatcatgtgctcatgccctcttttgccatgtgatgccttctaccatgttatgatgcatccagaagactctcaccacatgcagccccttgatcttagacttctcagcttctagaactgtgagtgaaataaacttcttttctttataaattaccccgtctgtggtattgtatagcagcagaaaatagacatcagcctgaagttcccccaggctggcattaaatactaattattaattagtatttatagtgcaaggataaattcaagtttagccctggttagaatgaccacatttcaagggaggggctttgtacttctgtgcatatctgtaaggataaaaatcttaatactattctcactgaaattaatggtttaggttaggtaaggttgttagtgctaataattatttcttttaataaaatattcttagttgcgttgttcaaaaaacatagatgatttgaatttatattttttggccaaaatatatttataattttgagtaggaattccagagtattggtagctataaccactttgggttccctgccattgcttctggtgcctcattttttctgacgtcttccattttcttacatttgtcttctaaggtggagttaagattactcagttaagattatttcactttaggcctctgctgtcttctgcttttttttttaaaatgaatggatataatatcccaatacattttgataattgaacaacagctacatttttaagtgaggctactttcttctaattttttaaatttatttttctcagtttttaaaaaaaatgtcagattggctaagagttggggcagctttcttatgtgagagtagtagatgacagcaaatatttgtgatgttaaaatgataatcctaatagttttcttttagaatctttataataaaaaccctttgaggctgagggtgaatttgtatgttcctaaagtgacaaaaaatgttcttggggcatagtaatttaaatcttagatgcttttattagtataattttttggtagaaatttggcattaaaaaatgcatacagagctttttctacatacagggcaagacagcattttgtcatggcaattagtaaatagataattataaaacatctaattttaagcaatttgttacagaaacgatacaggtacattgtggcaaaaatagaagatacaaaacaagcaaatatgagaaaaaatatacatgccaccacctatatatgacttttagtactttataatcttttgtctatatatgtctatatggatatatacgtattctttttatccaaatggtattacattgtacattctgttttgaaacctgccttttttagtcatttacatctacttttccatctcagtaacttttcatcttgtgtaatgcccggatcacattaaaatgtttccaattagctcaaaaatgtcctttatggctggtttggctaaaacagtatccaggccagcattgcacctatgaaattggctgttaggaatcttgtatctttaaaaatcaagggcagcaacccatcctcccgcttcccccacctcccaccacccccccaccttttttttttcttaaagatactggcttgttgaagagagaatgggtcatgtcctacaaactgtctgaatttgtccagtttgctgtctcatagtgtcatttagcttgttttatcctatgtatttcctgcaaattaaaatttgtatctgaatccttggtggatttgagttgaagatccttaaccatcatagatgatgctgtgtcctttatattgcatgtcagaagttacatgatctttacttgattcatgatgaggagatggccactgaaattggacagtgacagtcttttctgcccattgttcaattatattcgtctctttacattagaaagtattttgggtagtagtattttggtgctgtaagaaagttcattttctcatcaaccactcacctattggtttaacaccatttgttgatctttgagtatatcagtaatttcatcagggtttgcaaaataagactttaaattctattgttttacattattaattgatgttttttgataaggtagaacttgtgaaatgggactatttgtttgtctttaaatacagtctctataggaaagacaaaataaatacttaaatctcactctttaccatttttcaaagtgaagaactattccgttaaccacctcaaaagatgataaataaaaagggtatttttagttgtttcaactttttttttttttttgagatggggtcttactctgttgcccaggctggtgtgctgtggtgcaatcatggtacaccgaagcctcagtctccctgggctcagatgattctcccacctcagcctgggactaaaggtgtacaccaccatggccagccaatttttttgtattttttgtagagatggggttttgccatattgcccagcctagcctcaaactcctgggctgaaggaatccacccatctcagcctcccaaagtgctaggattacagacgtgaccaacaatatccggccttaacttttttcttttgagtgtctttatagactcaaggacttttatttaattcagggtgttagtaccatttaaatgttttctttgatgctcagattatcacagctagtcatttggacctttataccacctcctatgtccatttgatataggccattaatctctataagccttcctccttctcttggaatgaaaaggtatcctaggctcacctgtaccttccctactccagacctggcattaagtctttttccaaggagtttggtaccttttagtttattatgatattagagatgaaaatctgtgttctaggaatgtttattactgctagagtgatgttgcttttaggccatttcagagaaaagacctagaaaacagatttttacaaacatgaattcatactgatatttttagttttttacatgatttcttgattttacaatattatctgctttcttaacttaaaattatgaaccttaaagtcattagcataacttctttgcttatttctacaacataaagaaaatagtcctggtgcggtggctcacactgtaatcccagcactttgggagattgaggcaggtggattgcttgagctcaggagttcaagaccaacctgggcaacatgatgaaaccttgtctttacaaaaaattagctgggcatggtggcatgtgcttgtattcccagctactcaggaggctgaggtgggaggatcacctgagcccaggaggtcaaggctctagtgagccatgatcatgccaccacactccagcctgggtgacaaagtgagaccctgtttcagggggaaaaaaaagataaaatagtttgaggaggctggatgtagtggctcatgcatgtcatcctggcactttgggaggtcaaggtgggaggatggcttgagcccaggagtttgagaccagcctgtgccacatcatgagacctggtctctatttaaaaaaaaaaaaaaaagaaaatagtttgaggatatcaataatgatattactagaatcagtaaaactaccaaaagaagtttaaagtttcttcctagtgtttttttgttcttagaatacttcctaccaagaagtgcagtaaaagtgcagtgtccaaatagcccttgtaacaaaacctttctctttctcctgggtgccaatttgacatttaatcagttttgtttctagcagtgttcaatttattagattataagtcttttttttctttatattattctaagatcaaaaatatataaagatatacacaggagtcctgctgctacctgttcttgctatgcttttccccttttcttccctttctctgtgaagcagccatttttattagtttcttgtttatcactcatgcatgcatatgtttattgaggatgttgacattcaagcaaatatatgggttaacattctttttgtcatccctatacgaaagatatacccagtatactctattgggtgggtttttttccttaaaatattcagtagatctctccagttagcacatagttatcttatagatagaacatatacatataaccttttcttaaactatgctattaaaataatagctttcagtaacttgataattatttttggattgaaaatactactgaaatcaactcaatcatgtgaaagctgcagaaagaaaaagacctagaaaaagggcattggattaggtcaactttgaattttatttggaagataaatgagtccagaagtgagtgggcagagattattggagttggtcttgaaatgaggcgttaggcagattgactgggctggtgtgaaaggtctgtcagaaaatcatgagattagattgaggtacctcaaaaaatgagagctggtatgatgagtgggtaagaatcataaaagcgtagagtgttgatgatttttatagtttataaatggttcttgtgtgtagagttttgtttttatgctagctatagtctgtaacataattcactataatgggcatgctaaatatccatgacagttgacccttgaacaacacagagggtaggggcgcctacccctgtgcagttgaaaattcacatgtaacttttgactccccaaaacttaatatttagcctatacttgactagaagtcttactgatgacataatgttcgttaatacatattttatatatgtgtcagatagcatatttgtataataaagtaagctgcaggaaaaatattaaaatcataaagaagagaaaatatacttactattcattaagtggaagtggatcctcataaaggtcttcatcctcactgccttcactttgagtaggccgaggagtaggagagagaggaaaggtcagacttgctgtctcatgggtggcagaggtagaagaaggtccacatacaagtggtccgacacagctcaaaccggttttgttcattggccaactgtagtttgattgaaagtaataataaatgaagtttctgcctcagttcagtattatcaagtcatagatagcaagggctggaagaaaccttagtagtaatctctttgagtctaattatcatgtagaataggaaattgcggtctagaaaggttaagtgacttgtccaaattacacaactagttagagacatagccagctcttaaatctgacttccagattttcactgtgtcttcttttttctgtaacgtgttgccttttttagccatgaaaaattagaagttgaactcttgtcttttcaggcaggtgtcaattttggggttttgttttgatttttggtttttgacataaagtactttagttctgtgatgtataaaccgtgagtttctgtttttctcatatacctgaatactgtccatgtggaagttaccttttatctttaccagtattaacacataaatggttatacataaatacattgaccaccttttattactccagctatagtggggaaaactttcttttcataactagctaatgttttaaaaagtattcttttagtttgattgctgcatatttcagatatttctttccttaactaaagtactcagatatttatccaaacattattgctatgggatttcctgcagaaagacttgaaggcgtatacaggaacaatattgatgatgtagtaaggtaagaatgctttgattttctatttcaaatattgatgtttatattcatgttgtgttttcatttagaaaagatttctaagccacagaaaaagatactttgtgatgtaaactattattgtagtgctctataatcattttttggcttaccgtacctaatggacttcagggggatacagttcatttgataagaactgaccttatacattacataatcaggtacttatgtgatatcatttcctggactccataaaatgctggtcaccaggtttaatacctggattccattacagtgtgatttttgtcttatttcatagttggggattaggcttaaaatcctagagtggatttattcagttaaatttattcacactaagatgtagatgactaatactgtatatttttatgtagaccaaattttaaggtaccactgtgcatatgtataccaactacctgaagaagtatttggttggtacaagagatatagaaaggaatcgctgggtgtaccaaggctaatcagttttataattttgcataattttctaactgcgattatcatttagtttagaacaatttatttctcaaggcccatgtaaatattatttttaaaatatacagtcttaagaattcatggcatattttatgaaaggaggaattcatgtctgatgtgcaaatagtcttaacatattttctaatttcagagcaaaaatatatatgtatgaataaattaactgtaaattgtcagtaggaaccttaagaattcgtggcgtattttatgaaaggaattcatgtctgatgtgcaaatagtcttaacatatttgctaatttcagagcaaaaatatatgtgtattaataaatcaactgtaaattgtcagtaagaaccttaatggctttaaaagttaaaatttcaggtcaagcattgtggtgtgctcctgtagtcccagctacttgggaggctgaggtgggaggatcacttggcttgaacccccaggtagagggtagaggccagtctgggtaacacagcgagaacccatctcttaaaaaaaaagtttaagttgtggattatttcctttacactctttcattagtatctttcctggagactttcaatttaaatacttggtgcttatgacaattagatgttaaaatggatgggaaagtactttgtaacttataaagcattatgcagatgtagactccttttataatagttgtgtaagtatataagacaacctacattcttcatgagctagccataagttttagcaacttgctttgaaccacggtagatttacaattttctgtagtattgagttgtgttcatttagaattttgtaatatttatattgaaaatcaaatttttgtacctacaaaaactacaaaaaatccccctagtttttatagtttctattaaaattatagctggtacatagggatgccagaaggactgtttaagaagctgaaaatagagaaatgaatttatcttctcatagttaggcagggcacagtagaaggatgcttaacattgcaagctgatgggaacagcaggttgatatagcttgtgataacacttctaaagaaaaagcaatgagccatagaaaaaagaaaaagatacattttgaattaaggaagatggtgaatctgggaagtgagcagtacagtcaccagacgtgtatcctctcctatggtacagaagtgtttattgggtctctttatggcctgcatgatatatcccacaagatgacctacttcacattattttaattctgtattcaactaagcactaattcaacccagccagattagtactcataccaaaaaagagtgaatactctgaatagagggcaggttttctgattatggtgagaatatctttgtggtaaattaatctggtgtgctagtttttacgttggtctcttctcagtgtcgttagtcactgaggctgattgatcatcttttaggttactgataaagttcctgtacagctgattttcagaccttagattgcaataacttcaccaagaaaatacttcattgggaagcattttggtccttccatttgattcataactcttacctttatgcctctgaaggaaaagatttatacattcagcttgtaattagtaatcaagactgaggtttagtctatctagcttcacaatctatctagtttgttttgtctagccatatgatttcttcaaatatgccatttcttaaaaaaaaatgttttatgtatcccgattaatatttagccagtggttcttttagccgatggatcttgtcacctcttatgatactattaatagcatgtcaacatgaagaattatctgctgaatataatagctatgctgtccttgtttccttttgtctcattcttttttgattgggggataattggccaataaagctttgatagcctctattgcccaggcccctcctcttcttttatgagagaaaggatgaacagtgaccagaaataaaggtattgtttttttctatcaactaaaatggaaataaataattcctaagtaatttgcctgttaggattaaagtctccaagagaatggctgtgcctagtacctaagtgattaatttccttgattggttcacattatattgaggatattagtaatcagtagtgattccttttttggttcaaagatgatagtgtcacagtgaaaaatgtttttaaaatttttgtatacttaatttttctgttaacgaaagtattttcagttggatttttgtttgccctctctattagaatgcccaaagaatatttaaaattttccttttctcttatactgcatatttttcctgtgatttttccccaaacggaaaatactctgcagagattagactttgttattgttgtactacatcattgctttgactaaaataaactcagattgcaaataccttcaagcttacattgctcagtatttttttttttttttttttttgagacggagtctcactcttgtcgcccaggctggagtgcagtggtgccatctcagctcactgcaacctctgcctcctgggttcaagcgattctcctgcctcagcctgcggagcagctgggattatagatgcccgcccccacgcccagctgatttttgtatttgtagtagagatggggttttaccttgttggccagtctggtctcaaactcctgacctcgggtgatccatctgtctcggcctctggaattacaggtgtgagccgccacgcctggctaaattgatcagtattatttaactttgagggatatgatttgttatggaatgcgaagttttatacttgaggtactcagagtccttttgagacaaatatttaacttctccttttgaggttaccgcctacgattgggaattaatgtaaaaaataagccaaaagaaagtgagggaaaagtgaaccaagctgtaatttttttactcttttttattgttgttgttattgttgctgttttttactatcttgattgcaacagtttggcttatatatatagcatttggaattgacagtaagaaagccacatctcatagaagctaactattcccaaattgtttttttcttcttttcctcttactactgctgttttcctcctttcttgctgctaagctcttgtcctgacatgctggtaatatgaaacagtgttttattcagataattgattattctgtaatatgtatgttaatcttttttattacactttaagtaatagggtacatatgcacaacttacagattcgttacatatgtatacatgtgccgtgttggtttgctgcacccattaactcgtcatttacattaggtatttctcctaatgttatccctctcccaaccccccaccccaggacaggccccggtgtgtgatgttccccgccctgtgtccaagtgttctcgttgttcagttgccacctgtgagtgagaacatgcggtgtttggttttctgtccttgcgatagtttgctcagaatgatggtttccagcttcatctatgtccctacaaaggacgtgaagctcatccttttttatggctgcatactactccgtggtgtatatgtgccacattttcttaatccagtcagtcattgatggacatttgggttggttctaattctttgctattgtgaatagtgctgcagtaaacatacgtatgcatgtgtctttatagtagcatgatttataatcctttggatatatacccagtaatggaattgctgggtcaaatggtatttctagttctagatccctgaggaattgccacactgtcttccacaatggttgaactagtttacagtcccaccaacagtgtaaaaatgttcctgttcctccacatcctctccagcacctgttgtttcctgactttttaatgatcgccattctaactggtgtgagatggtatctcattgtggttttgatttgcatttctctgatggccagtgatgatgagcattttttcatgtgtctgttggctgcataaatgtctataaatgtcttcttttggaaagtgtctgttcatatcctttgcccactttttgatggggttgtttgatttttttcctgtaaatttgtttaagttctttgtagattctggatattagccatttgtcagatgggtagattgcagaaattttcttccattctataggttgcctgtccactctgatggtagtttcttttgctgtgcagaagctctttagtttaattagatcccatttgactattttggcttttgttgccattgcttttggtgttttagtcatgaagtccttgcccatgcctatgtcctgaatggtattgcctaggtttgcttctagggtttttatggttttaggtctacatttaagtctttaacatttaagtctttaatccatcttgaattaatttttgtataaggtgtaaggaaatgatccaatttcagctttctacatatgactagccagttttcccagcaccatttattaactagggaaccctttccccatttcctgtttttgtcaggtttgtcaaagatcagatggttgtagatgtgtcatgttatttctgagggctctgttctgttccattggtctatatctctgttttggtaccagtaccatgctgttttggttactgtagccttgtagtatagtttgaagtcaggtagtgtgatgcctccagcttttttctttctgcttaggattgtcttggcagtgcgggctcttttttggctccatatgaactttaaagtagttttttccaattctgtgaagaaatttattggtagcttgatggggatggcattgtttctataaattaccttgggcagtgtggccattttcacgatattgattcttcctacccatgagcatggaatgttcttccatttgtttgtgtcatcttttatttcgttgagcagtggtttgtagttcttgaacaggtccttcacatcccttgtaagttggattcctaggtattttattctctttgtagcagttgtgagtgggagttcactcatgatttggctctctgtctgtctgttattggtgtataagaatgcttgtgatttttgcacattgattttgtatcctgagactttgctgaagttgcttatcagctgaaggagattttgggctgagacagtggggctttctaaatatacaatcatgtcatctgcaaacagggacaatttgacttcctcttttcctaattgaataccctttatttctttctcttgcctgattgccctggccagaacttccaacactgtgttgaataggagtggtgagagagggcgtccctgtcttgtgccagttttcaaagggaatgcttccagtttttgcccattcagtatgatactggctgtgggtttgtcataaatagctcttattattttgagatacgttccatcaatacctaatttattgagagtttttagcatgaagggctgttgaattttgtcaaaggccttttctgcatctattgagataatcatgtggttttttgtctttggttctctttatgtgatggattatgtttattgatttgcgtatgttgaaccagccttgcatcacagggatgaagccaacttgatcttggtggataagctttttgatgtgctgctggattcggtttgccaatattttattgaggatttttgcattgatgttcatcaggggtgttggtctaaaattctctttttttgttgtgtctctgccaggctttggtatcgggatggtgctggcctcctaaaatgagttagggaggattccctctttttctatgaattggaatagtttcagaaggaatggtaccagctcgtctttttacctctggtagaattcggctgtgaatctgtctggtcctggacttttttcggttggtaggctattaattattgcctcaatttcagagcctgttactggtctattcagggattcaacttcttcctggtttagtcttgggagggtgtatatgtccaggaatttatccatttcttctagattttctagtttatttgcatagaggtgtttatagtattctctgatggtagtttgtatttctgtgggatcagtggtgatatcccctttatcattttttattgcatctatttgattcttctctcttttcttccttattagtcttgctagcagtctatcaattttgttttttaaaaaaaccagctcctggattcattgattttttttttgaagggttttttgtgtcctatctccttcaattctgctctgatcttagttatttcttgccttctgctagcttttgaatttgtttgctcttgcatctctagttgttttaattgtgatattagggtgttgattttagatctttcctgctttctcttgtgggcatttagtgctataaatttccctgtatacactgctttaaatgtgtcccagagattctggtacgttgtgtctttgttctcattggtttcaaagaacatctttatttctgccttcattttgttatttacccagtagtcattcaggagcaggttgatcagtttccatgtagttgtgcagttttgagtgagtttcttaatcctgagttctaatttgattttactgtggtctgagagacagtttgttgtgatttttattcttttacatttgctgaggagtgagtgctttacttccaactatgtggtcaattttggaataagtgtgatgtggtgctgataagaatgtatattctgttgatttgggatggagagttctgtagatgtctattaggtctgcttggtgcagagctgagttcaaatcctggatatccttgttaaccttctgtctcgttgatctgtctcatattgacagtggggtgttaaaatctcccgatattaactgtgtgggagtctaagtctctttgtaggtcactcaggacttgctttatgaatctaggtgctcctgtattgggtgtatatatatttaggatagttagctcttcttgttgaattgatccctttaccattatgtaatgcccttctttgtctcttttgatctttgttggtttacagtttgttttattagagactaggattgcaacccctgctttttcttgctttccatttgcttggtagatcttcctccatccctttattttgagcctgtgtgtgtgtctgcatgtgagatacatctcctgaatacagcacactgatgggtcttgactctttatccaatttgccagtctttgtcttttaattggggcatttaccccatttacatttaaggttaatattgttatgtgtgaatttgatcctgtcattgtgatgttagctggttattttgcccattagttgatgtagtttcttcctagcatcaatggtctttacaatttggcatgtttttgcagtggctgataccagttgttcctttccatgtttagtgcttccttcaggagctcttgtaaggcaggcctggtagtgacaaaatctctcagcatttgcttgtctgtaaaggtttttatttctccttcccttatgaagcttagtttggctggatatgaaattctgggttgaaaattcttttctttaagaatgtagactattggcccccactctcttctggcttgtagagtttcagcggagagatctgctgttagtctgatgggcttccctttgtgggtaacccgacctttctctctggctgccctttacattttttcctgcatttccaccttggtgaatctaacaattatgtgtcttggggttgctcttctctaggagtatctttgtggtggtctctgtattccctgaatttgaatgttggcgtgccttgctatgttggggaagttctcctggataatatcctgaagagtgttttccagcttggttccattctccccgtcactgtcaagtacaccaatcaaacgtagatttggtcttttcacatagtcccatatttcttggaggctttgttcatttctttttactgttttttctctaaacttctcttcttgcttcatttcattcatttgatctgcaattactgataccctttcttccacttgatcgaatcggctgctgaagcttgtgcatgcgtcatgtagttctcgagccatgattttcagctccatcaggtcatttatggtcttctgtacactgtttattctagttagccatttgtctaatcttttttcaagatttttagcttccttgcgatgggtttgaacatcctcctttagctcggagaagtttgttactactgaccttctgaagcctacttctgtcaactcgtcaaagtcattcttcatccagctttgttccattgctggtgaggagctgtgatcctttggaggagaagaggcactctgggttttagaattttcagcttttctgctctgttttctccccatctttgtggttttatctacctttggtctttgattatggtgacctacagatggggttttggtgtggatgtcctttttgttaatgttgatgctattcctttctgtttgttagttttccttctaacagtcaggtccctcagctgtaggtctgttggagtttgctggaggtccactccagacactgtctggatatcaccagtggaggctgcagaacagcaaatattgcagaacagcaaatattgctgccggagccttcctctggaagcttcgtcttgggggcacccggctgtatgaggtgtcagtcggcccctactgggaggtgtctcccagttaggctacaagggggtcagggacccacttgaggaggcagtctgtccgttctcagagctcaaacactgtgctggtagaactactgctctcttcagagctgtcagagagggatgtttaagtctgaggaagtttctgctgccttttgttcagctatgccctgcctccagaggtggagtctacagaggcaggcaggcctccttgagctgtggtgggctccacccagttggagcttcccaaccactttacctactcaagcctcagcaatgatggacgcccctcccccagccaggctgctgccttgaagttcaatttggaactgctacgctagcagtgagcaaggctctgtgggcgtaggacctgctgagccaggcacgggatataatctcctgttgtgccatttgctaagaccgttggaaaagcgcagtatttgggtggcagtgtcccaattttcccggtatagtgtgtcacagcttcccttggcttggaaagggacatcccccgaccccttgtgcttcctgggtgaggcaatgccccgccctgcttcagctcaccctccgtgggctgcacccactttccaaccagtcccagtgagaagaaccaggtacctcagttggaaatgcagaaatcacctgtcttccgcgtggatcatgctgggagctgcagacaggagctgttcctatttgaccatcttggaatgccacctttttttttttttttttttttttaaggcagtttcttgctctgtcacccaggctggggtgcagaggcatgatcacggctcactgcaacctctgccttctgggctcaagtgatcctcccacctcagcctcccaagttgctgggaccacagccacgcatcaccaggcctggctaatttttgtgttttttgtagagatagggtttcgctgtgtttcccaggctggtctcaaactcctgcgctcaagcgatccgcctgcctcagcctcccaaagtgctgggattacaggcatgagccactgcacccggccaatatgtatgttaatctcatccctcaagctgatactgaagtttttcaatttatgttatttggtgtaaatctaggcagtctttaacaaaattggtgcttcatgtgtttaagaggcataacttaagaattgtttgtttcttataaatcaggagaatggaggtttaatagaggtgaactgtctttctcactgcagaacctttaatatgccactatgcattgtaaatctcccaagagtgagattctagtatgatgcttttcttttccttttctgttctttccctttccctctacctcctttttcttttctttgttggtggcatgagtcctatattataaggaaatgcttttagagtacagtcttctgatatatagtgatttttgaaaaagatttatttattgtcttgttcactgtgagctttttcccccatgtataagcagctgtgtaatagattcaagagcaccccctcgcccctttttttttgagacagagtctcgctcggtcactcaggctggagtacggtggtgctgtgatcatggttcacctcgacttctgggctccagcgatcctcccacctcatcctctcaagtagctgggaccacaggcgtgtgtcaccgtacatggctaatttttctatttttagtagaggcagagtttcgccatgttttccaggctggtctcgaactcctgaactcaagcagtccacctgtctcagcctcccaaagtgctgggattacaggcgtgagcctccactcccagtctcaaatattcttttgaaatatttgaaatatgttgatctctcagtctttcaaccttagttgtatgttgattttcaataaaaaggaagtatttgttgccctaacatcagtattggctattcagtttaaaaaaggagttaaagagatgttatttataggcaggcttcaaaagaggaaagaatgatcagtttcattctctgtttctagcatattctgactccttctctcatattacctcgtttttcccacattttttctttaataaagtgaaattcacataacagctaaccattttaaccacggaaagtgtacattccgtggcatttattaccttcacagtgttacctctacctttatcaagtttcaaaacattttatcaccccaaaagaaagccctgttcttattgggtgcctcttgcttttttttttttttttttttttaaatcttgagacggggtcttggtttgtttcccaggttgtagtgcaatggggcgatctcatctcattgcaacctctgcctcccgagttcaagcaattctcctgcctcagcctcccgtagctgggactacaggcacgcgccacatgcctggctaatttttgtatttttagtagaaacgtggtttcaccatgttggccaggctagccttgaactcctgaccttaggtaatctgcctgccttggcctcccaaagtgctgggattataggcgtgagccaccgttctggccacctcctacttctttcattagtcttaattccttagtggatttgacagtgtttatattatctacaccaatgcatttttttgtatgttaataataggagatatttattgggcatttatttacatacttatttgcatgtgtaactgttgtatagccagtttatgtatataatcttactaaatctctacagtaaatctatccccatttcatagatggtttaaaagaagttaacttccccaagcattacttttagtaagtagtgagactgaaggttgagttctggtctgtcagattccgaagttgtttccttaggaaccatattatcttgtgtacaactcttgggctaatcttgttaatattctttatttgacctcacactgttgattcataccatgtttaaaattgaaatacattacctatatttaaaaattgagacctcacataaaaagctatatttctagctgcttttgaaatttcgaaggatcttccaacacttggctgacattcctgcgtgacaaaaatcagctggagctgtgtaatgtccgacctgtctctgtcaatgaacagattattcattgtcatttctcatctgtttttgagattgtaactttgattctgtataactcatagaattagtagttagacctatatatgttagttattacattatttgtatatgtacagactgctttagacaatattgtagtgttatatgttaattttatcaattaaaatgtgctataggatcattgtagagatcttgtctctaattaacaggattcataaagagaaaacaaaggagagaaacatccagattgaaaagacctacatagtgccaagcacaataaaagaaaccctatactaggcaaattattatgaaatttgttttaggacaccagaaataaagataatatctaaaaactttttagaatcgcctaggagggattaggaatatgaatagcatctaacttgttggcagtagaattgaaggtagaaggtggtaaaacatcaccttgaaagttctgcattcagcctagaattctgtatccagttaaaccatcaatcaagtgtgaaagtagggggaaaaactcaaggactaaaaaaatgtgctcatgaagaacattttttttggacattacccagaagatgtggttcaacaaaacaagggaataaaccaagaaaggaaataaaagagcttcagtaaacagagaatcccactcagaagcaacaaagaagaaagtcccaggatgacagctgtgacacaagctgaaaagttaccagttttgcttggagcaggagattagaacttccgggaaaataatcaaattgatagatggatgttgaaatatttggagaaaaatgtaatggattcttgcaaaactgagcaaattagaaaaaggaaacaattattagcattggtggtttgagttaacccaaaattgtgatgttgctattttaggggaattaagataagtgaaacacgtatggaatactgctagttttgtaagtctcctttaccatggcaggacatctgtagttaataaatctgtaagaagcagtattaagaataatattttaaaatacctaattaaataggaggaaaaagaatccgagtagttgagggtgattgcatctggggagaagcaggaataaaggtttgaagataaatagggccagagatgagtaattttgttactgtgataatatattttatatatatgtgtatgtgtgtgcgtgtgtatatatatatatgagatatatctcatatatatgagatatatatgatatatatatgatatatatgatatatatatataaaacatacagttcagtagcattaacatctagcattcagtacatttacattgttgtgcaattgtcaccactgtccatctctagaactttttcattatcccacactgacataccacacccattaaataataactcctcattgctcctcctgttagtaccaaccattgttctactttcatctctatgtatttgactattctaggtacctcgtataagcggaatcacgtgatatctttttgtaactggcttatttcactaactatcttcgaggttcatccatgttgtagcagttgttagcatttccttccttttaaaaggccgaataatattccattgttatgtatataccatattttgtttatccatttattcatcaatagacacttttggctgttgtgaataatgctgctatgaatatgggtatgtaatacctgtttgagtatctgctttcatttcttttggatatgtacccaaaagtgagattgctggattgaatggtaattctatatttaaatttttgagaaaccaccatactgtttgatatactggctgcccaattttacattaccaccagcaatacactagggttccgaatttgccacatcctcaccatcgtgttgttttgtttatgtttttttttaataatagccatcctaatgggtgtgaagtctcattgtggttttaatttgcattttcctaatgatcagcgatattgaacatttgcacatgcttatttggtcatttgtatatcagctttggagcaatgatgtctcttgaagccttttgcccatttatgaattgagtagtttgggatttttaaattgtgttttagaagttctttgtatactctggctgggcacggtggctcgtgcctttgggaggccgaggcaggtggatcacgaggttaggagttcaagaccagactggctggtatagtgaaaccccatctctactaaaaatacaaaaattagctggtgtggtcgggcgtgatggtgcacacctgtagtcccagctgttggggaggctgaggcaggagacttgcttgaacccggaaggtgggggggttgcagtgagctgagattgtgccactgcactcagcctgggtgacagagcgagactctgtctcaaaaaaaaagaaaaagaagttctttgtattctctgaatattaatcccttattggatatgttatttgcaaatattttctcccataaagaatgggttactttttcactctgttgattgtttcctttgctgtgcaggagctatttagcttgaaaaaatccaacttgtctgttttcttttgttgcctgtacctttggtgtcacattcaagaaataattgccaaattcataccatgaaactttcccccatgttttctcctgaaggtttttatagttttagctctcacatttaggtgtttgatccattttgagttaaattttgtatataatgttatgtaagagtccagcttcacacttttggatgtgaatatctagttttcccagcattatttgttgaaaagagtgtctttttccccattgaatagtcttggcactcttgttgaaaattatttgacaatagatgcaagggtttatttttgggctctctcgactattctgttagactatatgtttgtttttttatgtcaggaccaccctaattttagtactgtagctttatagtaaaatttgaaaccaggaagtatatgtcttgtgtatttatttacttattttttgaaatagcatctggctctgttgcccaggctggagtgcagtggcacaatcttagctcactgcaacctccacatctgaggttcaagcaatcctcccacctcagcctcctgagtagctgggattgtagacacataccaccatgctcagctagtttttgtatttcttgtagagacagggttttgccatattgcccaggtgggtctcgaactcctgagcccaagcagtctgccctcctcagtgtcccaaagtgttgcgattacaggtatgagccaccgtgcatggccccaacttcttatatttcaagatggttttggcccttcagggccctttgtgagttttaggatggattttttttttaacttttaagtttaggggtgcatgtgcaggtttattacataggtaaatttgtgtcaaggtgttctgttgtatagattatttcatcacccaggtattaagcctagtacccattagttatttttcctgagctcgcctcctcccacctggatttttttttttatttctaccagaaacattgttgggattttggtagggattgtattagtctgtagattgcattgaatagtactgacatcttaacaatattaagtctttaaagccatgaacaccagatgtctttccatttatttacgtattctttcttttctttcagcaatgttttgtaattttcagtgtacaagtattttacctccttggttaagttaattcctaagtattttattcattctgatgatcttataaatctgttttcttaatttcctttcctaattgttcattcttagggtatagaaacacaactgattcttcgcacattaaatttgtgccctgcttcttcgcgggtttgtttattctttttttgtgtttgaaatccttgaggttttctgcatataagattatatcatctgcaaatgagataattttacttgttcctttccaatttgagatgatttttattcattttcttaatgctctctcatacattcaatactatgttgaatggaagtggtgaaagcaggcatcctgtcttgtttctgaccttataggaaaagctttcaattctttgccattgactatcatgttagctatgggattttttttttccccccagatagagtctcgctgtgtcgcccaggctggagtgcagtggtgcgatctcggttcactgcaccctcctcctcccgccaggttcaagtgattctcctgcttcagcctcccaagtagctgggattacaggtgtccaccactatgcccagctaattttcgtatttttagtagaaacatggtttcaccatgttggccaagctggtctcgaactcttggcctcaagtgattcacctgcctcggcctcccatagtgctgggattatagtcagccaccatgcctggccactgtgggatttttatatatggccttcattatgttgtggtaatttctttttattcttagtttattgagtgtttttatcataaaatcttgttgaattttttcaaatattttttctgtgctagttgagatgaccatgtgatttgttttcttctttctattaacatgatatattgtttttcatatattgagccatttttgcatcccaggaataaattttacttggtcttcgtgtataatccatttaataagctgtggaattcagtttgttggttctgtgttgaggactttatatcaatgttcctaagggctactggtctatagttttcttttgtagtttctttgactttgctatcagggcaatgctggcctcattgaatgtgttaggaagtgtttcctcatccatttttggcaaaactttgggaaaaaacgatgttctttaaatgtttgatagaattcacagataaaaaaatcacatctagggcttttgtctggaatttttttattgttattattgattcagtcttgttactagttataggtctattcagattttctttttgtgtgtgtgattcagtattagtacattttgtacttctcgttatttctccatttaatctatattatctaatttgttggcatacaattgttcatagtactgtcttctcttttttttaaacttctgtgcagttgatactaatgtccctacttttatttcagattttagtaatttgaatcttctttatcttaatacaggtaaagctgggtcaattgttaaaattttttcaaagaaccagtttttggtttcattgatttttctctgttatttttctattatttatatcctctctaagctttgttatttccttcatcctgctagctttgggtttattagtttgttctttttctagttccttaagatttgaagttggattattgatttgagatcgttttcaattaaatgtgtacaactacaaatttccctcttaggactgcttttgctgttctgtaatttttggcatgttgtgtttttttgttttaatttatttctaagtattttctaagttcccttgtgatttcttctgcgtttaaccgtgtattttttaatttccacagttggtgaattttctactttttcttcagttattgattttattgattttcagtggcatcctgttgtgatagaagatactttatttggttccctgttttttttttaaaacagagtgttgctctgtcacccaggctggagtgcagtggtgcgatcttggctcactgcaacatccacctcctgggttcgagcaattctcctggtctcagcctccccagtaggtaggattacaggcacatgccaccatgcccagctaatttttgtatttttagtagagacagggtttcgccatgttggccaggatgatctcgaactcctgacttcaagtgatccacccgccttggcctcccgaagtgctaggattataggcgttagccaccttgtctggcccagatcctctattttcttgcctatattctgactgggtgtttttgtccattattgagagtagggtatcgaagtgtccagctgttatttcagaactgtctgtttaccttcaattctgtcaattttttgcttcatataattgggtggtctcttattaggcatgtaaatgtttttgattattatatcttcttgctatattgacacttattgatgtgtaatatcttttttgtctcaaccttgttttgatttagtttgtctaatattaatgtagctacctgcactctcatttggttattacttgtatagaatgtctttttacatcccttatttgtgtctttggatctgaaatgagtctcttgtagacagcatatacaatctcttgtagattgtgtttttcttatacattctgtcaaactctgccttttgattgaagagttttatcatttacaattaaagtaattattgataaggatttaactgctgccattttgctgtttattttctatatgccttacagcttttttgtccctcatttcctgccttactggcacttgtgtttagttgatattttgtggtgaagtgttttaatttccttgttatttccttttgtttatattctgctattttctgtgtgtgtgtgtgtgtggttgccattgggggtcacatttaatgccctaaagttataacactgcaatttcaatttataccaatttactttcaatagcatacaaaaattcagctcataagattcagtccctgctcccttccagttattgatgtcataaaattacatttttatgtattgtgtgtctaaaagcgtagactaataattgttttttaatgcagtagtgtcttaatttgtggaaaacaaaaagtggagttgtaaaccaatgttacaataatgctagctttggtaattgctcatgtatttatcatttctcagatctttatttcttaatacagcttcaagttactgtctagtctccttttatttcagcctgaaagactcacttcagcgtttcttgcaggacaggtctggtgataatgaactctctcagattttgttaatctggaaatgtcttaatgtcttcatttttaaggacatttttgctggatatagtattctcagttgacaggtatttgtgtttatttgtttgtttcctttcaggattttaaatatatcatcccactgccttctgtccttcaagagttctgatgagaaatctgctgatattgaggatccctttgtatgttacaagttgcttctctcattccatgttcaggattctcttttttcatagtttgattataatctatctcagtttttcctacttggatctctgagtttttcctacttggagttaattgagcttcttgaatatttatattcatgtctcatcaaatttgggaagtttttgattaatatttcttcacataatcttttttgccccttttctctctttttattctgggattcccagagtgtgtatgtgttggtccacttgatgatggtgttccacaggtgtcttaggctcttgtcttcaattttccttcagttttttttttctgttcctcagacacgtggtattttcagctgttctgccttccaagtttactgattcttctgcctgcccaaattggcttttgaattcctctagtaaatttttatttcagtttttgtacttttcagctccagcatttattttttgatttttttatgttttctctttattgatatttcaattttgttttttgacattatccatatcttcctttagctttttgagcacctttcaacatttgttttaaagtctatgtctagtaagtgtctgccatctgatcttctcaggcacagtttctgttaatttatttttttccttttggcctatacttaatgttttgcttggggtagtttttttttttggtatgctttgtgatttttgttgttgttgtcaaaaactggaatttgaatcttaaagagtggtaactttggaaattagatttttctcttttctctaagatgtgctattttgtttggtttttttatttgttgtagagtatttctatgctgggtgtaatcttaagatcttctcggcctgtgtttttccctgggcatgtgtagtgactttctaaattgccctatgtatgcagttcttttgcagtagtatcctccttaaatgtttggctcctaaaaggcaaaataaataaataaataaataaaaattaaaaattaaaaataaatcaaaggggtgaaatagctctggatctttaaatccctggagcaattttttcagccaatggcagttaaataatgatagtctgcctctgtgtcacattttgatcagaagcagcaattagcaatcagaacacagattcctgatatttggagggcaaggtctttgttgccaaccttgactcttacaaactgtgtgcagggtgctctgggaacatgtgcatggttgcctgctttgagagtgggtgatgggtagccgcgacggcacaaagagctgaaattgactcaaactaactgatttaccattcaagtctttccttagaaactgaaaacctgaatagactccagagttccagaatcacagattctgcttacagtcgtctaggtggggagatgggttcctggtacttctgattctgccatctttctttgactaattttttttttttgttcttgagatggagtcttactctgttgcccgcccaggctggagtacagtagcatgacctcggctcactgcaacctctgcctcccgggttcaggcaattctcctgcctcagcttcccaagtagctggaattacaggcgtgcaccaccatgcctggctaattttttgtatttttagtagagacagggtttcaccatgttggccaggctagtctcgaactcctgacctcaggtgatcaacccgcctcagcctcccaaagtgctaggattacaggtgtgagccactgcacccagctcttagacaaattttttattccaaactttttttattttatcatttgaaaggtatatgtttattattttgtcaaaaataattttaaaacgtattcttgaagcttatttagatctgtttcataggaactgtgaagaaagtaaagaatttaaaaaatgaagacagattttctcaccctgcttatgggtgcttctcgtgctagccttttgcaagtgtcgggaagtgtaacctgcaggaggcatcagggctttgggcctgcatggtctgagtgctgccctgtgagtttcagaaggcgcagcaacctgtatacctgaaagccatctctgctggggcaggtacctagtgtccccacctacctgggtcgtagtcaggccctgggcaagcctgctatgcttttccttccctaatccctcaggggtgggatagagagcacagtggcctcccagggaggtagaagctgctccagactaacaatcagagctgccagttcttaatccccaagaccgccagacttcacaaagacataccgaggtctgtgctgtcagtgccccactactacactcccttaagtagccccacattcttgtgcttgtttcttttttctgctctctttccttgcccaggtaagaggtctgcccataagggatattttgcagcatgtgaagctttttaaaaagttaggcttattgaagtataatttacacacaaagtacaaaaaaaaaaagactgtgttctcaaatctgtgagtcattaatgggtttagatgtttatatattgaaattattggaagtaaggtatgtttatattagaaagatttgtagtctagattatccaagttttgggagtattacctctctgcttttgtttatctacttttttagtctctactttccaagtatctataggcaaattttcccatttccctttggaaagtgctgttttcttgctttttttccgcctttccattgtgtcagacttataaggcaatcagccaactgtgggcatgaaatccttgggaggaaagagaaggaagtgggaggggcagccatggtgaatgtttccctaagttatagtcaagttctttgagagaacataacctcatcccctttttaaactgttgtaatactttcttttaaatagattgtttattctcctgcaagtctcacagttgttcacagtggtaggtaagaaatcataaagttcaaatattaaagggagctcacaaaagagcatggtttcaccagccctcactaaaaacaaaattatgggaaaatgctgtaaaagaaaccagaattcttggttgcaaatgatagaaagtgactctgatttacctaatcagaaaggaatttttaaaaaagtattaggtaggtcatagtttgacaacaagacttggaagataggtggaagctaagggaagcaagacatggccccaaggtttcaacaggagcaatctgcttaggactttgctgcttggacacttggtgtaatagctgctgccactatgcctcgaaactggtgactctgctcattaactcacctcctctggtgatctctaggaataatctctgactctcctgtaccttgtcctcactaggattcggtatccacggcaaaaagatctattaatagttggtatcaggcctgtacatgtgttaagagaaagatgaggaaagaagtatctgcttctaatctcttgaaattatctccaaattgaaatggtattttggttgcctaacagcctgaagatgacaaatatcccctacaaatttctcctattttaccctcttcctaactatatctgtaatttaaagtttcacatattcttttgaaaattgttttcattgtttacccactttttaagaaaagcaaatgggaacatactaccactgtttggcccctttcaaaaattttatatctgaggaatcttccatattgttgtggacatctacctacctgattcttttattaactaccttttatttcattttatgatcatgctatcattaataggcccctatgatgaatatataagttgtttccagttttttttttgtcattgagaacagttcacatatgtatcttgttgtcttttccaagtatatctttaaggcaaattcttagcagtggagttgctaggtccattgcgtctatggtttaaactagtgccttcaaaaatggtattttatatactcactgtttaagagtgcttcttccttctatccccactaactttggcaaactgaatagtttcaaactttaactttttatagcttgttggcaaaaaatggtatcttgttatttgatcgtgtttttttaattgtgaggtttagcgactttttgatgtattggtcttatgtactttctggtgtgtgtgtatgtatatactgaccctattttcaacttatttttcttttagtttgtttgtattttccttaatgattttcaggaaaccaattttattctttcttcagacagttgtctaatgttctgcttctcttgccatttgaattttgtgactacaaaattcagatgaaacaataatagcataaagaacttggtgggttatcttttgttttgcattattgattgtttattaagaaatattctttaaaagtcaccttgcttaaattagcaagtaggaaatgctttcaataaagagaactgtcatgtacccactactccttacttactgaatcatcttcttttggatagagaagataaaagtgaaaagggaatttaagagttcctgcctttttccttgtctttagcattatatagctgtttaatgtgtgggagtctaatttcttttttctttcttgagacaaagtctcactctgttgcccaggctggagtgcagtggcacagtcttggctcactgcaacctctgcctcccaggttcaagcaattctcctgccttagcctcctgagtagctgggactacaggcatgtgccaccatgcccggctaatttttgtatttttagtagatatgggacttcaccatgttggccaggctggtcttgaactcctgacctctagtgatctgcctgctttggcctcccaaagtgctgggattacaggcatgagccactgcacctggcctaatttttttattgttctttttggtgtgaacattctcccctcctccaagccttttgtttttactattttcatgttcctttatatgtgctgctgttttgtttcatctgtaattatctctcatccccttttttggctattataatatatatatgtacgttttgaatctgagctttgaaggtaaattcactgcagctgtgttggttgattttagataatttgtgtatttcctcctttgtcttttttaaactggagtcatttgtagttgtttatacagaattttagtttttaaaaccacaagtctttcattataggttgagttatgaattcatagcctgttatttaaatgaagcttttgaaatctgttttactgatctgtatcatatctaactacgccagtatttccttccttgtctgacgtgaactctaaaattatgtgaacactttctccctgtttcctggcatttccactcaaacttgttcctcattcttagttagaaatatatccagaattgtagtttctttctaatctaatgacagaagcaaattaatcaagcatggcaagaatttattggaaaactgcatgtagttgaaaatatgtttagtatatattttgacagctgtgaagtctctaatttttactgtaccttttctctgttccaattttatgctctattctaaggatgtacccatttctactacctgactagggagcatgtgtattgtatcccagcagattttttttttcatagatagatatcctttagatatctgttatccagtgtaggtagccactagccacatgtagctatcattatgtttaaatgtaaataaaataaaataaatttactgagttgtttttgctagctacatttcttgtgctcagtagctacatgtggcttgtgattactgtattaagacagcacagatacagaacattttcattattgcaaaagttctgttagacagtgctgttctatacagtgtcattctgcctctcattctaaaaagttctaattcctgaagttgatgtactctttctgttgctgtcctctagcttaatcaaaataaatttgagtctttttaaaggtaggttgcattttacatactgatatttctaaatcagaggctatttatattactttttttatattacttttaaaaattagctttattggagtataatttacatgcaataaaatctacccattttaaatgtacggttcattgacttttgagaaatacacacacacacacacacacacacacaccttcttgtaaacacacaccttcttgtaaacacaacaaccaagatttagaacactcgctttatgaaaagtttccctcatgcccatttgtagtcagtccccaaacctggtttcaggcaatctctgatctgctttctatatgctttgcctatactaggattacatataaatacagtcatatagcatgtattcctttttgtgtctggcttctttcttttagtataatatttttgaaatttatccctgttgttactagtatcaataatttgttcttttttattgctgactaatattacattgtatggatatgacatttctttattagtgtggtgggcatttgagttgttttcagtttgggtctgttatgaacaaagctgctgtaagcattcatgtgcaagacttttgtggacatatatttttgtttctgtttattcaatacctttgagtagaattgttgggtcacatgatgtagatcagttgaacagagtagattccagaaaagttcacatacacatttcttgacaaaggtgctgagattattcatgggaaaaggataatcttttaaacaaataatactggaacaatagagaaaacaaagtgaaccttgacttttatgtcttatcatatacaaaaattaatttgaagtggattgttgacctaaatgtaaaagtaaaatttaaaaatataaaacttctagatgaaaacataggagaaaatctctgtgacttttggtttaaagatttcttagacagtacatataaaattaactatataaggaaaaaatggacaaatttgactttatcaacattaaaaatttctgctcattgaaagactcaaaatgaaaaggcaagcagttttggagaaaatatttgcaatacatatatctgaaaaaggacttgaatgtataatatatacataaagatgctcttacaacttcataatgagaaaataaccccataaagagaagggcaggccgggtgcagtggctcatgcctataatgccagcacttttggaggctgaggtgggtgaattgcttgagcccaggagtttgagaccagcctgggcaacatggtgaaacccagtctctacaaaataaaaaaatacaagaaattagctgggcatgatggcatgcacctgtagtcctagctgtttgggaggctgaggtgggaggatagcttgagcctgggaggcggaggctgcagtgagctgtgatcgcaccgctgcacgcttgcctgagcaacacagtgagatcctgtctcaaaacaaacaaacaaaaaaaaaaacaaaaaatggaaacagaaattttacaaaagaagatatatagatggccagtaggcatatgaaaagatgtttaaaatcagtcatcagggaaatgaaaatttaaacgtaatgagatagctcatatttactggaatggctcaaaaagggcttacaggaattggcaaagacatagattaactggaactcttatgcatgttggttagagcacaaaatgatatgatttcttgggagaaatatttggcagtttttaagattatttttgatagccttctgaatttcttagtgagttataggtcagttctgccactgtttctttcttttctttctttctttctttccttccttcccttccttcccttccttgcctgtcttgcctgccttccttgccttgcctgccttgccttcctttcttcctttcttccctttcttttctttcttttctttttttttttaaaggagtctcgttttgttgcccaggctggagtgcagtggcacgatcttggctcactgcaacctccacctcccgggttcaagcaattctccctgcctcagcttccccaatagctgggattacaggcgcgttccaccatacttggctaatttttttaattttggcagaggcagggtttcactgtgttggccaggctagtctcgaacacctgacctcaagtgatctgcccgccttggcctcccagagtactgggattacaggtgtgagccactgcgcctggcctggcactgtttatttcttttccctccagttttatacctatttagagagattagattttcttgagtactaggaatcactatttttgagcagaattattcaaaactgttattattttttctttaacttgaggcaatgtaggagaaagcagtactgtgcaggtgaaagttacaaacaagaacattttaaacaagatagttactttccatgtattggatacgtaacagaattaattctaataaccatcctgaagatggtcaggaggcattagttaagaattgaaatgtttggagcttgcctgtgttgatgggattaaggcagggatgatttatgtgtaaatttatgcgttagtaacagcagtaaccgctgtagttacactagggttctaagagcaaatgttgattaaacatgaatgtagcaggagtgataaggtttggctctgtgtccccacccaaatctcatgtggagttgtgatcctcagtgttggaggaggggcttggtaggaggtgattggatcatgggagtggtttgtaatggttttagcactatcaccctagagctgtctcgcgaaagagttctcctgagatctgcttgtatataagtgtgtagcacctcccctctttgctctctctcttcctcctactcctgccgcggggacgtgcttgctttcccttggccttctgccatgattgtaagtttcctgaggcctctgattaaacctttcttcttctaaaagattacccagtctcaggtagttctttatagcagtgtgagaatggactaatacaaggggaaatatatatggttaccaaatagcgaattagccatgggaaaaagtagcaaataaataattattttactttttcagatgctaatttttcttttcgtttattttaggattggtgggagctgtccaatgtccttaggctgttttccaaatgagataccaaaagctagttctccatcgggtttctcaggctgctagaagcattcattattatggttgtcattacttcgagttctgttgccgctatgcccacagtagtatttgttacataacaggtgcttgataaatatttgctaaatgaatttttggaaaatacaatctgccacacctttcttctacagtttacaatcttctgttgagatcatccgatagattttttttcttagatattgtacttttgaggcctcaaattgctgtcttttgtattttctatgtctgcagagactttccatctttcactcattgtattcattgttttttaacatctttgtacatatttatagtaactgttttaaagtcactgtctgttaattcaaacatctggttcatcttggagtctgattctattgcctgctcttttttctttgtaataggtcatgtttttctgctttgcctgtctagtaaattttaatcgtatgttgaaatgtagggagtttggattgttacttcctttaagggtgctgagtttcattttgtcaggcatttaaattgatagttgatttagtattgtcaggtttggttctctttgttaaagcaggcatttttcagatttgtcttttgtcctagggcatggtttttaacttcaaggttgccctttccaatgtctcagctaagtatctggggtgttccatgaggtctcttccactttgcctaggccagaactccagcttctcccagtattatatttcgttacctctggcgtcatctccgttatgctttcagatcctgcgcatagacagcccagcccccagccaaggacctgagatgaaatccatacaaaattcttagtcccttgctccacaaactccaacagccttagcagtctaatctcttcctgtttacctcagtgaaatctgtgttccacttgagttccatttccttctgtatcagagaagagccaccatgctgaaagcaaggggcactatgtttctttgttcttaaggatggtagcctatctgcaacaactgtagtgtgatataaaaatatataatttatgttgctgacagttacaaatactgcttgcagtactttgtaacataatttttcagattcaagttcatatactctttttttccacatcaccacacacatattttcagacttcctcctcatccttcttcttgccagtagttgtattataattcctgccagtagttacattataattttggttatatcaatattgagtttttatgggattataactagataaatgccattcatagttaagtgatagagtatattgtgacttttttcctgcatgttttattttttctggacttcacagttgtctctcttttttttaaaaaaattagttttcaatgttcttagctttaattcataaactcacccctaattgtataaatctctcaacatgtttaagcacatttggcattatatcaattttatcttttccaggtgccttctaatctgtcccagtctggactaattgttcttcctggcttgctgtatggctgtctactcaagatgtcccttcaccatcattctagggattcccttttcctctcttgtgggttagattcttcagttcttggagactgtcatcttctttcatggtttcccactcttgttttggcggagcacatctttagtaacttcctgacaaagtgtatggtttgagatttcgctgattttaaaatgcccttattatatagtcacacttgatttatagtctgtcttggtatagaattctaggctgagaagagttttccctcaaaatcagaaggttttgcccaattgttttttagctgctagtattgctgttaaaaaggataatgtcattttgattctagattcttttatgaaacctgtttcttctctggcagcttttaggatcttctgtttctttggtattcagaaatttcatgagatatgtgtgcttctattttggtcttattttcatctgttttgccaggtactcatgcaactttccagtttgaaaactcacatccttcacttttgagtatttttcttgagttatgtcttcggtttcttctcagtgttctctgtttctggaactcctaaaatatatttaacatcctgaactcttagtttttgtttagtcttctgattttcatttgtctttttattctgtatattctgttaattcctcggcttcatggtcttctagcccttcttttgcctatcttatggggttgaggattaaacagtttatatacctgaggtgcttaggatatgtctgtcatatagtaagtgcttgtgttagctgtaattgttgtttactttcataactgtcttgagggaaaggtctttggtcttgattctttgacttcttggctgtacatgaccttggacgagttatgtaatctctttgagacctacctccctcttctgtatagtgttaataagctctagctctcagatgtttgtgagggtcgaatggagtatatatgtgaaaatgtttaatacctttgtacagaattaatagttagtacgtggatctttcaaatatcaaaagttttcagtttgatgggaaaatgatgtctgaattttcagggttatttttaagagtacttgattatgactgtcttgtaaatctctatgagctaggtatacttgcactaaatgctaatgctttttaaagaagttatgtcttaatattcagtctcattatgttaggttgaagatagaagattatgaaaatattctctgaaaagctctggttttacttcagattgtataaatctgtgtaatgtaataattatttaagaatgacatgattactactctaaacccatagaaggggtatttgttggattatttattttcacttaaatggtatttgagattaggaaaaagaaaatctgtcttttggtttttcttgatagtattaatgtaatttcaaatgttagctcatttttgttaatggtggctttttgtttgtttgttttgttttaaggtttttggattcaaagcataaaaaccattacaagatatacaatctgtaagtatgttttcttatttgtatgcttgcaaatatcttctaaaacaactattaagtgaaagttatctgcttgttagagtgaggtagagttaaagatacattttaacagaattgtattcctaaaccgattaagtcaagaagtccaagagcattgttagatcatttagaaagtgtagtgatgaggtaaaacattgttggcacagattcatgttacttgatctgctttaaatgacttggcatctagcccatatttgagcccataaccgtgtggtaatttgaagtgtaattcacagtagagcttctgttaaagcactaatagcatcttccatggaggtatacttcagagtgaatataattttgtttatcctgtgtctctagagctattgactgaaaaagctgttagggcattctctaactgtacatcacctaagttatttaaaattgctgaattaggtggcttgtcttgtctaggacagagttttaaggactgcccacctgattgatagagctagttgaccttatctttaactttttgtttttcttttgactttgggagtagagatgtgaaaaggtaaaaaggaaggaaggaagagaaaacttaactctttttgcccatgaagactgtttttccttctcaaaatattgactattttctgatttgtaaaaatcggcacataaaacgtgttattttttacttgacttttatctttcccatgtgatatctataaattatagataggaaaaatttatctgtaatttagtgatctttctagtgtgataaaacgtcagaagtactgagagtggagtggacattgatattgttactctcagtaagttttcactgatttttctcagagtcatgaaggaacaaacgtttgttaagtccttatcacttattagataacacaaaacatgttgggggggtgtgtacagaggtgagtaagatgtagctcccattctcaagtcgcttacattctaatgtaaaaggtagacaaagcattacagaagaagtaactctgctatagaaggttgcaatgaagagaacattggaaacactaattttaccttataaagaaggtttcataaaggaaggcaagtttgagctggggtgaaaaggaccagtaagggttgactttcaagccaaggagaggaggggaagtgatgttacaggccaaaggaatggcattgtaagaagcttgttggcataaaagtgtttagaatatggcagcgaattcattatcatcagattgtggtgtctgtatgttgggggtgggagagaattgtggtggcaataggcaacaagataaaagaaagtaaaaggtgttatggaaacttaatgggtccagcttacaaatgatctatgcatttaggggtctttctcttttcctgataaacctctcctacaaagagccttgttgcggataccatagtgtttctttggaggaaaataaaaactacaaagctttgtattttttgcacaactggattcagaatataagtaataaaaaaggacaagaactttcaaaagctagaagccattaaactgagtcacttcagggttagactatcagaactggggatttagaaagtctcagaatggaaatcgaaggacaccaaagacaaattcggcctttttcaaaattttattctagtttaacatattcaaagaaagggaaggaaattcttttcattcctgtgtgtagtgacttcctgctttaagaacttaggacttcagctgtactatcagtattgtaggccacttaacattattatggttaaagttggcattggagagagcctaggaacctaactgcctgtttgtttttatatttccaaccattggattcccaagttaatgaagtctgtttattagttgagggtagctcttaatgcatatattttaatgccccttccccacatggaatcataagctttcagaactggagagtacctgaaagagatcatttagtccaaccttctcattttacagatggggaatctgaggcctagagaagttaagtgagttgaacaaggtcacacaggtacatatggtagccgaccatccactgtttatgccaatattccctttacgttttgcttttttgcttgttcgttttaacctctccaaattttactgacttcagaagtttctagaactaagttatagcatgttttgagttctaatgtcactttccgatcttctttaccttttttctacctctgtttgtatttctggttctggttaagtgagtctggtaagcagcaggtgttctattttatttcttttatttttaggatagtattacatgtgatatatatgtctttgcaaacatacataatttgaagatcttaaaatatttgcactaggcatacccacatttaatagtatgttaaatcttttatagcaattatgatatacatgggtgaagaagagttcctaatatggcctttctgattaactgtatctgtttatatctgtgttttcttcaggcattcataacattaagcaaattcaggtgtactgttacttaattgaattaatcagtttgttttgtacaagtatattttatttttgttccttgttgtataatctggtaggaatggggaaggggagatagtgaataaagagatgtatacttcttgcctttgaggaatttaagttttcactgtataccaattttttaaaggtatttactatatttcagtgcatattttatttgacatactttatcattttgtggtaaacctttagctttactaattttcatctattaagttttcttttgtaagatggtgatagcttcatcaaagagagtaaagaagagacctgcctacctagctgattctatggcaaatctcacttctctggaagcttttcctgttaatcttattccttcagtttctgcctcttgtttcataaaaactcattctttaaatgcttattcatttctcttgtctcatataaaccaatatgaggtactggtatcttttgagttttagttataaggaagcataaatggttaaatttaaatggctaaaccccatttgccatttgtgtatctttaattttagtttgttgagagacttatcactaccaaaccacaaagaatttaaaagaaactgtcagtaggtataggtggaaggagggcatttatcagagattttaatttaagaagaaagtcttcatccttatcctaccaacccccattccctgagcatatttatcattactagtcccagcatatttgctcccatatttcctatgcttacctgtgaagattttcataactttttccttgctttttactgtcactgttggttctgtgatttatgacagatactgctcttgtaggaatgctggctttgactgaaatttgttactgcttttgtatttaaaactttttttttattataagtagaattatggaacagtagtagaaaaagtttgacttttgtaatcagagatactgagcttgagttctggctctttcatttgtatactgttatttggggcaagttttttaatgctcttaagtcttagctttctcatatataaaatggagataataacagttatcacgtgattgtgaggatgaaacaaaaaaaagtggaaactctttgtaaggtgtgttcatctggttgacacttagtagtcattacttccactttccgtccatatagtcctcttaacagtaatatttgagaggcatttttattaaagcagtcttaaggagtgttcgtcaaaccacatgttctgggatcctgagaaagtaggggaagtttagagaactgaagctgcacaaaactaatgtttattttctgttgtgttgtcctgagaccagcttcttagattgtgtttcctagtcctacatctctgattccttataaaatattccattatgaattcttcactattgacaatttctccccttttatcttaaaagtaccaaagaaagtgtaaaatgtgactgtcttgtcagtcctctttttcctgtttttcatgtcagtgggtatgaaattactagcaaggatgcatatatgtgcatatgtcattactaaatgcattttctttctagaaaaactcaatatactaaattgtactaaaaaggaaaagcttgttttgttttgagtggtagtatgaaagttgttttattttaggtctgaccagttagaaaccaatggattgtagtttatttataattagttaaaccttcatgtgaatttggttttgaattacctttaaggtagagaagaaactatatagatgtttttcagggtttctaaatgtacaatacaggttcacaatcacttatttgaaactcttggggccaagtatgtttccattttcagaaattttagttttcaaaaggtagcacagataaatatacttttacataaacaccccagtggggtgtgggtcagtacctgaaatgaaatgttttactcttcgctctaagtgtattaaatattatgtacaatcttattacttcagatcaggatttgctgtagttgagtttgccataaaacttaagagaaaattttagatgttttgaacttttgggatattgaaattgcaggttaaggagctatggacctttatttgttttaaaatgctaagagtttattttaagtaatttttaaaaaatttgttttgcatagtagttggagttaccagggtactgctaaccacactgatatgtaagatctctttctgagccttttattgtttgtaaacatggcctgttaatcattagaaagccagtacatactaacatatcactgctattaagacaaatattagcatactctagtaatgacaagtcagcattttactattctgtattgattttacttattctttcattactctcatactgtaattaaaacttgcaatctgagagactgttgaaaaaggtgatcgttggcttttcaacagggagtaaggtctggtttaaaaaaaaattagtaagcatttggccaagtagattaacaacattcagtttttctttactgtccttatgcttttactatttttaacatatatctttttgaagaatagtttgagaattatgtatgcttaactatgagatacagatactattgaaactagtcagttgtttataggtacttgtaaaattaaaaatatattccaatagcatgcagatttttcatagaggaaatttgaaagcatggaagcacctgaatttacagtactctgtattagtggcatcacaagtttttaagcaaatgtattagctctaattgcatacacttaatcttttaagctttggttttattattataatatgggggtgataacagtatctacttaatagaattcttgttattacatgaaataattaatgttaaacacagcataatatgtgtcacattataaagattcaggcaatgtttgttagtattagtacttttttttcttcctaagtgcaaaagataactttatatcacttttaaacttttcttttagttgtgctgaaagacattatgacaccgccaaatttaattgcagaggtaggtatgaatgtactgtactatgttgtataacttaaacccgatagactgtatcttactgtcataacaataatgagtcatccagattatcgagtgagatacatatttaagaattatctttaaaaatttcaaaaattttaattttactgttgtgttttaggaaaaagtattgcataaagctattaatattgtcaggaagactaaagtgcagcatagactaagaattaggaaaattcctagactaaaaatagtataaggagagggtttacctactatttgaggcagttggtctaatagtaagcaatcacagggagaaagcagaactacttaactcttctgtgttgaggaatgacataaaaggtaggaaaggatataacaaatgttgataagaggagtctgatggatgagaggagggaactgctttaaatgagtttctacttcagacataagttaattctcagagcccacaaaaactttcacttttatttgtgaaatacaactcagttctcatggcttaacactttaaaccatgagaaaactgaagagttgagaagcttggcagatgctgctgtgatagtcaaaaagaaagtgggtgccatgagctactattgatgtatttgccattgatccctcctgaaaatctagaatggactttcagacaaatggtttgaaaattctaaatcactaatgattgagatttagtataggtttactaagaacgggttttttttgtttttgtttttggtggatttaggctgttgcttactaagcaaagcaggctttagttgaggtttatcttgctttaaacagatatttaacagattttcctggaggtttttgtgtaccactgggaaaatgaagttaggcagatgactaagtgaaagctgtcctgctgactccttataatgatagtcattgtctaccagaagatctctcctgtcacaccaaaggataattgattatatcctgtaccatattatgagtcacctgattggagatataagacatacttctcacatatttagatgacacaggttagtacattgaatatcagccagggtttttaaggatcttaatagagtggaactaaggtagaaactattaagagcaattaatagtgatatatctatagtcctgtttctaaacaagtttttttaaaaacctcaactctgactatagtgaacagagaagtcttggactcttacaattcatgtgagaagacctgaaactttgataacaattatatacattttgtgagtaatttctttggtgtatgccttcacatatctctggtatgtgacctatgctgcagtccattgagcatagattcccagaatgtattctcctgcagaaaatggaggaaaataatacttggcttccctaatgattacatgtgtatacaacactaacatttgcaagaccacctttaaataacacacttagcatttttattttatgaaatgtaatatgtagttctttgcatagtttatcctattagtaatctattctgtctttggaatatgttttgtgatgatgaaataaatactataaatagtattattccttttgcattgagagtcctgacgaaatgtccatgtgacagttcattttgggtttagctctacctctaatatgtgacctatgctaccagtccgtatagcgtaaattcccagaatatatcctcctgaataaaatgggggaaaataatacctggcttccttaatgattatatttaagacttatcaagagactattttctatttaacaattagaaagttaagcaatacattatttttctctggaatccagtgtttcttttaaatacctgttaagtttgtatgcaacatttctaaagttacctacttgttaattaaaaattcaagagtttttttttcttattctgaggttatctttttaccacagttgcacaatatccttttgaagaccataacccaccacagctagaacttatcaaacccttttgtgaagatcttgaccaatggctaagtgaagatgacaatcatgttgcagcaattcactgtaaagctggaaagggacgaactggtgtaatgatatgtgcatatttattacatcggggcaaatttttaaaggcacaagaggccctagatttctatggggaagtaaggaccagagacaaaaaggtaagttattttttgatgtttttcctttcctcttcctggatctgagaatttattggaaaacagattttgggtttctttttttccttcagttttattgaggtgtaattgacaagtaaaaattatatataaatacaatgtataatatgatgttttgatgtatgtgtatatacattgtgaaatgattactacagtcaaactacttaacatattcatcacctcacataattattattctccccccagggtgaaagcatttaagatctacaagctacaattttcaattatacaatgttattattaactatagtcactatgctgtccagtagagcttcagatcttgttcatcttgtgttcctccctccccaccctcagtccctggaaaacaggttttaaagatagttgctaatccttatttcttctaaatttttaaatcagttgctgcctcaatttctatatgagaaatgactgattgatttcatttttctgttcacgctaccattttcatatcatactagcacatgttacccattaactgtattgcagatttggtctcacaaaattcttctaaaataacatttttaaaaagcatattaatcaaaaataagctttatatttctgaagcttgtttgagcatagaatgcctttggataaaataccattacctagtaaagtgtgaacttttataatccataaaaattattcttttataagaatattcataaatgtagttagattaatagaagattctcgattctttgatcagaaaactaaggactatattgaaaaatcagtgacaaatttaattcttatagtacatctgaaagaaaaaagaaaactcttgggagaacttttacagtgatttaattttgctgttgatatatttctttgggtggtaagtatggcaaaacatgttaaaatttaatgcaaagagattttgtacatttttccatctctaagaaggacaaagcctaagcccctccagatagatagaaaaactcatttagagagttctccttcatgttaatctaatttcttcttaattcagctgtaaaacagaaatagaatgatcgtattaatcatttaaagctgtgtaattgcatagattccttgttcctttaccccctcttatatcttgtttcctatcctttgtgactttttttgcattatatataaggatgccgaaatactgtttattgttgatagtttacaaaattgaatcttacattagtgcataattttggtgaatgttgaagattatggtagattgccttacatttctgcatattgtttgcaccttggaatgatagcactggcatgaattatagagctgaggatctaaagatttttactttgatttatcccattatcatctgcagggaaacaattgcttttactgattaaaaatgcaggctgggcacagcggctcacgcctgtaatcccagtactttgggaggccgaggcgggcggatcacaaggtcaagagatcgagaccatcctggccaaccaacatggtgaaacctcatctctactaaaaatacaaaaattagctgggtgtggtggcgcgtgcctgtaatcccagctactcaggatgctgaggcaggagaatcgcttgaacccgggaggtggaggttgcagtgagccgagactgtgccactgcactccagcctggtgatagagggagactccatctcaaaaaaaaaaaaaaatgcagtagcaaaagcgatggtagaaatttaaaacagagttgatgagcagcatatattttggtagtggaaaaaaaggtaaaaaattttttgtaataaaatagaaaaattttgtaatgtggaggcgcagaacactagatttaagccagggggtcttaaattgtgttacattccttttaaagtctgatggaaggtataaatgttctcccctcaaaaaatgtgcatagtgtacataaaattttgcagtttttattacattgaaatatattcttttagacagaatgtaaaagaaccttcatgaaaactatgtcacttttttatgcaaaaaccagtggctactacatgagagcaatgaataaatctaagtggtacaaattaaccaaaattaagctttagttctgttcaatactaaattttaatgaaaagactgctatttaacttttaaaataacaagttgaaactatgctctttgactttgactttgcaacttttatatgatctttgatatccaatcagtgttgactttggtaaaaagtgctgaaaatgctattttacaaaagaaagaagagtaaatggaatctgtagattctattgcctgatgaaagtagacgtgtcaagaaataagaattctccaaggctcttcagataaattcatgtttcatcattttctttgccttcaagttactgagatcatttttggcaagatctgtatcattaatgctgtgttaggaaagaaaagattatgactccacattttactttcaaggttgaagagttaaactgtttaaaaagagtgtatgttatcctgtaaacagcagtatcaggctgtagaatttgtcttctgaaagcagggaacttatatatagcaaagaacttcatagtgctcccatttcttgacaaaacctctcgagaagctcttgattgaaagtcttggctttcatgaatctggcagctttcacaatagtggatttttcatgacaaatcatcttacacagggaattattcaagggttggcacttgaaacagtagaatactttcacaacaagagataagatttctttcaggattgatgacagtcttgcaccctagcgcatactgatgaagagagcagtgggtgaccatgacatggagagcttctgtctttaccagtgccccaatatcagatgtgttgtctggcagtaaggtgtactgtctgcctacagaatactgaggtttcttcaggagaagttttttggtaaagaaactttaccattttgaaagtgttaatgttttctgaagcttccaaaaagattccaaaatgggaatgtttccttgattgtgtcaccatgcttgcatttgatgaaaacttgtagccggctatactgagaaatcatatctgaagaaaggtggtacttccaatctttttgtgacctactttattattgtttttttaatgtcagggttttttttggaatggagaaaagtatttgatagaggtattgcaacagtcttattcttcttcatgctacaagtatatttgactctttctaagatacttgccttcactgttcaactgtgtgactttttgtttgtttagcattacaatcaatatcctagtaggatgatttaatcaatgatttttaattggaacaaatagtttttgtaatggtctaggcttttccaacttaactgtgctctcacatgtggtctctttttctccctctttcctccttcttatacactctcacccacacacatatgcatacataccctgtctgatgtatctgcttcttcagaatagttggctgtgctctgctgatgatgagaacttgccatttaagaaggacttgggatagtccatgtcatcatgttcagggataaaagtaaaacccaagggcatttaaactttattgtattttattttctgtttccagtccaaattaaatccaagagaaggctccataatcaaaaagtaaggacatattttaaatttgccaatgggaagatattctagtcattacagtctggtaatactatcaattctgtttctcttcagaggtgaggggagactatttgatgaaatcgtaagtcctgtagggtgttgtgaaatagggccagaatgaaagatagcaagaatagtgttatgaaaataaaatgcaaagtttataatatcatgtggtaaaatgtaatagtatttacttcatcagtagaactgctctagtagctgtatattctccatccttgcataggttggaatatcccccaagtgaaaagagattgatgggctaatagttaatagaaaatggagatctgtacatacagtgttaagaatgtagatattaaaattgttatatttagctgttacataatattaagactcagagttaagtaatttcactgaaattgattgctttttgtgtcttggagtcaaaataaataactgaaatctactatacttggctcatgcttaattaatatacttagaccatatttcggatgaattattcacagaatctaaaggagtatcctcgtgttcttaccttctttatccctgtgtttatttaaaaaggcaaaaaaaatggagcagatgctgttggttgaccatattttactgaacagtagcatttgtgtttaggttgaaacagcattagaaaactagatacggattaaagtcagtggtaggtttttttttttttttcttccaggaatgtttcttatagatgatcaaacaggcacaggaaggggaagtgttgtgatcaatattatccagttaatattagcattcagaggaaaatttgagtcctctgatacactgttaaatttctttctatactatcaagtccacaaatcctggaactgcaaaagaattttgagactgttcaaaataattaatctctgtataggctcaggctttcctgcaaggttatgaaatgctgataaaattggtcttattttgaaaggctcctcagcttatacctttccttacaaatgcttccttacaaatgctaaagcatttaatgactcctgacttaaagggaatttggacagattgaggttgttggtcttggaaatataatactgcaggcttctgtaaaatacttgaaatgtaattgttttaaaactttcaaagataccacttgtttgcctgttggttagaatactggtgaaataatttttaatcttttatgaataactaatttcatcataagaaaacttagctaagcatggtaaagctgttgttatacaactgtggaattcttcctgaggagtaactatcttataataaatgtagttgattatctaaagtagttttattcttggaatatctcataataggtttattctcttcttgtcagtatttccttgtagattgagcctgtggatttgcatttttgtaattgtgaatcaccattataggagatacatgcattttatctacttttcagtttgtatggggttaactttattagaattatctttaatgttattttgcttatatccttaattttaattatagacaaacattaagaagctggagaaaattatgttctagtgacatttatatagaagaagaatcttttttccccctttcttttttgaagggagatgaggcagtcatattttggtaaagaatttgtagactttgcagaggtctcttcaaaataatctggctcagagtcttgacatatcctcagcagacatggtgcaaattagatggcagagtggtgggtacaagttgaccataaaataacgcattaggttagtaatgcccaaataatactttgggttttcagtgttgcagagaagtcagacaactgatagttattataaagaaaaatgttctgagagtgaggtaaccgcttaagggaaggaagcctccttctgtcttattcactaatttacaagaagataattgtgttacacttccttaggagtcattcatttgtatatttgacacttttgctttatgaacatgtgaagattattcaaaagtaagctgttggtgatttttttcttccaagaaagcatgccacagggcaacttctagggttggttctcatctagtcctgtgctccacactatctgcatctgcacttaagtttcaatattagataactcacatgtttaaactatgaagaaagagttaaaacatcctgagaatgctagtaagtatgtatttttgaaaggacttccaaaatttgagtttaaagaggtaaactccttttacatgacaaagttacttagaaacactactgctgtttccctctcccttgccttctccctgtcccatgcatacccccagctgtgttccagaatgatggcacataaagtaaacattcatatttatttccctttttttgttttttttttttttttttttttttgcttgtttgttttgtttttttgtttgagacagtctcactcaatcacccaggctggagtgcagtggcaacatctcagctcactgcaacctctacctcctgagttcaagcgattctcctgcctcagcctcccgagcagctgggattacaggcgcctgcccccacgcctggctaatttttgtatttttagtagagatggggtttcgccatgttggccagactggtcttgaactcttgacctcaagtgatccgcccacctcggcctcccaaagtgctgagattacaggcatgagtcactgtgcctggcctcttattttttctttggttaaacttttagggaaaaagtttgagctgcttttaattttctttttgtttttaaataaattattaaagtttctctatgttaggaactcttgtgtacatgagttcattgagcttattcttaataaagacaaatcttctagaaataatagttgtatctttaaatgatctcaaggaaaatgtttggtttctctggggaatgaattttcatgacctaatcttaaatcaggttattttttctagcctgtttactaaatttctacatgttataacctaatgaaattttcttacttcctctttatttaaaacaaactataattactgtctttttaaaaatcttccaatgtggcgttcttatttttcttaacatttgaattttcctgggccaaaccatgttactatgatacacattatttaaggctgttatataatacagtaaaattgtagaactttcataccttgaaggatcttagcaattatttaattcaaacccattctaacatagatgataaaacagatttgcagggttgggcacggtggctcatacctatattcccagcactttgggagactcaagcgggaagattgcttgagcccaggagttcaagaccagcttgggcaacatagtgagaggctgtctctacaaaaaaatatttaaaaaatagccgggcatggtgtcacgtgcctgtagttccagctgcttgggaggctgaggtgggaggattgccagagcctgggaggttgaggctgcagtgagccatgatcacaccacagcactctagcctagagcctccctgtgtggcaggctctacacttcagataggcaacagatcgagaccttgtttcacaaaacgaacagatctgcaaagatcaacctgtcctaagtcatataatctctttgtgtaataataaaaaccccatcttctaaccttaaacctggtatttttttctacgaaactatgttctgcagtccaaattatttttctttattattttgaatcctaaagtagaaatagaaacttagaaaaataaaaagcaactcctttatgacatatgaggactttttcagttttaaataagaaaaacccaactcaaagtagcttaaataaaaggagacattttttgacttacataacctaaaagctctggcctggatctaggtgctcaacagatctcaagagtatctctcttattctctctccctcccttaccctcctcctcttttctctcttctgtatatatgttattttcaaacaggctctcacaagtagtggcaagatatagttcctaatagcttcaggtttgcattctacctactttagcaactatgatgagaagagagctacaatttgagcaaaaatttgtagggtgagttctgatttccctggattgaggcacatgcctattattcctgaaccaaatattctgtccagggaatggaattctctggggcatgtatctaaagctgaagtgtagagcctgccacacagggataataatagttttccaaagaaaaatcaaggaggggaaagaatgttggaaagagaaaaaaatatcagttgtctgcttcacatttgttctcaataattagtttcatagaagtgaaatactgtgtaacaccctaaactttagagattcttcgtagacaggaaaaataagaactcaatgaagttgtgacttcattcaaatcacgtagtttatatacatgctattagtaaaacccaggacagctgagtacaagttttacccttatattcacattgaggtccagatcctggttttgaatgagataattacgtgcagtcggactgttttctgatcctaaaaatagagacaataatatctatcttgtaaagttatggtagtgttaaagatatataaaatgttggcaagtaccttaatatacaataactactgctatatgttgtcattgtaataataatcatatttcttcctttgttgaattgctttcctgtagtaatcttattgtgatcatcctgaaacatagatttccgagcttcaagcaaacactattatgttgaaaaatctacattatttctaagtttagcagtgccagtggaaagtttattgaaatagaaaattacttttttaactgaggagtgtagattgtgaattcgtgattcatcttcttaggagatgatcggaatattgataaatattgatgcatagaatatgaacaaaacattacatatcttgtgctgtgatattaaagtagtattctgttctggtagtagtatggcagtattttaggtctgaaagatgtacataatctgtactttgaagtctgttttttaagagattaatcacaagagatttacataaaacaactaaggttaaaaataaatggtggattagagatacatcaggcaaatttcaatttcaaaagcagatgacagaatctcagtatcagggtagcatttaaagcaaaaagcattaaactggatcaaaaatgtcattttacatcaacacagggtacactccaggtaaagacttaacagttatgaacgaatgtgctaaacatcaaaatgtattaagtaaaagctgaaagaaatgaagaataattggtagaaaagcaatgataggaatccttaatgtacttcaaaaggcacgaagtaagaaggtacagtcatgtaccacataatgatgtttgagtcaacacctgacctggtatacgacaatggtcctataaaattataatggagctaaaaagcttctatcacctagtgatgttgaagccgttgcaatgcaatgtatcactcacatgtttgtggtaatgctggtgtaagcaaacttactgtactgtcagttgtataaaagcatagcacagttatgttcagcacataatactttataatgataaacgaatatgttactagtttacgtgtttacagtactattattttagcatgtgcttctgcttattaaaaaatgttaactataaaataatctttaggcagatcctacaggaggtattccagataaaggcattattgtcataggagatggcagctccatggatgttattgccccttaagaccttccagtgggacaagatgtataggtggaagacagtgatattgatgatcctgaccttgtagaggccaaggctaaagtatgtatttattagtttttaacaagagtttaaaaagtaaaaaaaaaaaataaatttaaaaatagaaaaaatcttaataaggatacaaagaaaaaatgtttttgtgtagctgtgtaatatgtttttgttttaagttaaatgttacaaaagagtcagagttaaatttttttatatttataaagtgaaaaagttataaaatgctaaggttaatttactgaagaaagaaaaaatttttaaacagatttagagtagcatgtttataaaatctacagtagtttacagtaatatcctaggccttcacattaactcaccactcacccactgactcacccagagcagcttccaatcctgtaagctccattcgtggtaagtgccctatacaggtgtacaatttttatatcctttataccatttttactgaaccttttctgtcttttagatacacaaataacattgtgttacagttgcctatgatattgaatacagtaacttactgtacaagtttgtagcataggagctgtatcatatagcctgggtgtgtagtgaactataccatctaggcttgtgtaagtatattttatgacacagtgatgaaatcatccagatacagtttctcttaagcaacacataactgtatatatatatatataggtggctttaataataaaataatgaaatatatttctttttttctgtcattgacaaaacaattaccagtcttactaattagatcaactgcaaaacaaaatctcactcaaaaataaaaatatgtaagtcccattccttgattacaattcattagaactggagatttttaaaaatgtttaaatttatatggaaatataaaatcatgttttaaataatttttgattcaatgaggaaatgtaaatttagaactaaagattaataactagagatttataaaggcaaaaatgttaatgaattaggaaacagtaaaccatttgaactaatctaaatactgattgcatgaaaatgccaataaaatcaatacatatttttaaaagccagtcaaggataaaagaaaagagggaaactaaaagtgagacattaagtatgagaaaggagataaaactaaagtgtggaggtgatgttaaaaattatattcaggtctgtgctaatcattttggaaatttcagtgagaagtgggcaattttcagtgaatatatcattgtaaatgctttgaggagagacaaaatctgaatagaccctgcaataatgaaaatgtctaggagccctcaagaaatacctggtttaaattgcatttcaggtggctggttatcacaccttgaagtatcaagtaattatgttatctaaattggaccaggtgttagaaaaatatgtgagacttcacaggtggctgcttatgtagcccttataccttaatctgataaaggtagcatatatttaaaaagagagaaaaccagaaggtacaatttagggaaaattaaatacttctatttggccaaagtaagagtacattcaagggaattgtgagaggtaagagtggaaacagaggttggagctgtatttttatgctgtgattgaattacagtgtgtgataaatattgctcttatttgggtagattaccatttaacattttgaattaattggtaattggattaatcttaacttttaaaaaactaatctgagagtggtataaaggatagattacagaatggataaagggtgataaatcagttggctatggcaaaattgcaggaagaaactgaaataggccacagaaaactgaaactgacattttgagtagtatttcagaatcaagatctggattttggcaactgaatagatgcgtaggaatcaaagatgagtatactaaatgaacttaatctatgatttgtctgtcattttattgtgtaccattagtgtgtatgcatgtatgtatgtgccaggtagttaataggctgactgtgtctcttagctccactctgctgcctgggcctttgccatagtgctggagttccctcacttctcttttctgtaaccctattatattactgctgtctctcagctgtgtttcattcctcaagcagaaagaagatgggaggatcatatagtagttgactagaagctgtggagtttgagtgctgggattatatctagttccattacttatgaagattatatctagttccattacttcacctcatctataaaatggtttaccaatagtacctaccttacatggttttatgagtattaaattatgtatttctaaagacatttagaacaatacaaagaatatagtgtgggctcaataagtgacgatggtgttagttattagaaggccatcgagtgctggagaaaataattgaatatcattgatggaaataaaggaagttttccacgttaaaaagcttcggtttttggaaatgtgtgttttcagtatttctgagattaccaggtagaaattccagccagatgttggaattctgcactggcagttgggaataaagtcatgttaaaggagataagttttggagttattgtgtaaaattggtaaagcactggaatagattggtttgacagaggggaaactctttttgagataggcctatatttagggacaagagaagagacaaccaataagggttgaaagaaaccttgagagagtaagtcctatgacagaagcagggaagtttcagaatgattgcagaaagatcagccaggctcttcctgttctccatcgtggtgcaggatcaaggtgaaaaggataaccccatgcaggaattttgcatctgcaggctccgcttcaacatctgtttaggagaaagtggagacagactgacctgagtaactaaggtcttggaacagcttacaggtcagaaccaggtgttttccaaagctagatatactgttagcgcctttggcaacagaagaaatgaaaagactgttgtctgctgcacagttcgaggggccaaggcagacgaaatcctggagaatgatctaaaggtgcaggagtgtgagttaagaaaaaataacttctcagatactggaaactttggttttgggacccaggaacacattgatctgggtatcagatatgacccaagcattgatgtctacagcctggacttctatgtggtgctggaaaagccaggtttcatcattgcaggtaagaagtgcgggacaggcttcattggtgccaaatagaatcagcaaagaggaggccatgcgctggttccagcagaagtatgatgggatcatccttcctggcaaataaattctcatttctacccaaaagggtaataaaaagttttcagtgaaatgtttaaaaaaaaaataaaaaaaagatcagccagcagccaggatgggattgtgaaaacagcaggaaattagttgttgacaaagcattaatgaccattaagaaatcagcctcggctgggcatggtggctcatccctgtaatcgtaacactttgggaggccaaggcagatttcttgagtccaggagttgagaccagcctaggcaacatggcaaaaccctcgttcctccttaataaataaataaatgaataaataaacaagcaagcaagcagggcttggtgttaggcgcctgtactcctagctactcgggaggctgagggggttgaacctgggaggcaaaggttgcagtgagccaagattgcactactgcactccagcctgggtgacagagtgagaccatggcacccccctccccttcaaaaagaaatcagcctcataatcaatttctctggattaaggagtaagagcgtctcaagatttgctgtttatagagagggaggctaatagtttgagagagatacagaatctagggagagtgtgggtttttggtctttcagttgtttgccagccttggataaagaatgaagattacttgagcatattatttagagacaagtggagagaataaaggcacatgccagataggagataattaataaagcacttgtccaaaatagaaacttgttgaacaggaagagacgtcaagtataaggagattttaagatgggagaagggaattttgagtgtttgtattggatgacctcagggttcccagtaaagcaggagctgaattcatcgaaggtgatgtgttggtcaggatcaagagagaggttgggagaacaaagtgctaaaatcgttgtggtcaagagtttaaaaagtgtataccagaagagttattgagtgataggggtttgaaataggcaaagctgtaggaaagggggctggaaggaatattaggaggaacactaaatatacttctgaggtctacctcctggtctgtgaacataaaggagctgaaagagtaatggctgaagttctttagtttagctaaagttttttagctaaagctagaattgttgaaagttgtatttgaggaaaaaaagttaaggatacagttgaccgttcgataatgtagcccactgttgaccagaagccctacccacaacataaacaggcaataacacatattttgtatgtgtattatatagtatattcttaacaataaagtaaactagagaaaagaacatgtatcaagaaaatcataaggaagagaaaacacatttacagtactgtactgtatttattggtaccatacatttatgttgctgtttacaagatgaagcatctgtctgaaatggccagcagctacagctgtacctatctactgtacatatcaagcaagtcactttattcttataatgtctatgacttctttctttgaaagcgcttccatcatcactgttggcacttcatatgggtctcatggtgttaaggtttacggcattgcactagacacaatgaaaactacacaagagggccgggcacggtggctcacgcctgtaatcccagcactttgggaggccgaggcgggcggatcatgaggtcaggagattgagaccatcctggctaacacagtgaaaccctgtctctattaaaaataaaaaaattagccaggcatggtggcacgtgcctgtaatcccagctaatcgggaggctgaggcaggagaatcgctttttcccagaaggcgtaggttgcagtgagccgagatcgtgccactgcactccagcctggatgatagagggagactctgtcgcaaaaaaaaagaaaagaaaaagaaaagaaaagaaaaacacacaagagccgtgagagagatagcttttgattgcaatacacaatttactggagagatgagctgatcatacagagatgattagtgtcacacagtgttttaaacagattcttgcaaccctggagttcactgcagtagcaacagaagttagctatgagattttaacagtagtatagtatgtactacagttaatattaggtagctatgatttaatgctgcatctttgcatttgtttacatttatcttgactacaagtggtattatgtctggtcttaaggtttgtgtgcatatgttttgatgaattttaactttttataataggtttgtgtatattttatggcagtaaatgataaaacagactaatctacatatattttatgtagtcatgacataaacctaactttttcttaactttttgatatttctagtctatgtgtttcatctgcaggttttttcaaattgttgaaatctctgaaaaattttattgaaaaaaaatccatatatgtaagtggacccacacatttcaaacctgtgttcaagggtcagctgtgtaaataattttcctcaaaattaaagtggaaaaggagagttactactagtagaaagtagaactgtacccttgggcaggggtgtgtgtgtgtagttaaagatcaatttaacttaaaaggtcttggttagagaataaaaactggcccttattagctttaatttacatgaaaaatgaaaaattttaggccaggcacagtggctcaggcctgtaatcccttaactttgggagaccaaggggagtggatcacttgaggtcaggagttcaagacagcctggccaacatgctgactcacccttccctactgaaaatacaaaagttagccaggcgcagtggccatccctacagtgctagctactcgggaggctgaggcaggagaattgcttgaacccgggaggcaaggttgcggtgagctgagatcgcaccactgcactccagactgggtgacagagcgagactccatctcaaaaaaaaaaaaaaaaaaaaaagatttgaaaacagagtattttttaatctgcaagagctttacagccttttattcatatgtataagcttttaaagatgactaaaattttagtgtggactttccactcattggaaatcctatattgcaggtgttaattcaattttagtgagtgtgcatcatggctcagagagataggactagaatgaggaggtcacattggagactctgaaacagatacatgtgagcctcccaactttttaatatttgttaatctagaagtgttgaattttgggtgctgacaaggcagcaggtagataagaattgcaaagttaagaaaatagactgtaatattgatggtaaactaattgattaaattttaaaatgtacttttccatgtttttctttgaattgtcagtaattttgtttcaactggtattcatacatagattattcacccaatgttgacaactagtagatttatatattttttatgttgcctatccttttttgggtaaggattaacagaatgtataatcacctacattataggtacactactaatcacttgctacttgaaaaaacctaaagctttgaaatctttttattattgcacacaaacttatgccaaaaatggagataaagagaaaaatgtcatccactaaaccccaacaaataatgttgacaatgtggtctactcgtagactcgcattgacttaatttttttaaatcttattgcatattttgactagataataaatgcatatggttaaaaaattcacatggttcaaaaaagtacacctcccactcatcttccatgtgatatttcctttctgcttagcaattctgtatttatcttgctaaacatgaatgacagttgtttgctgaaattacattaaatgtgacgtaataaaatcattgtaagtttacattttttaactttaataatttttaatgttttaatgaagagtatgaagagtagtagtactgctcttcaaagtactactactttaccttaccttttactgttttgttaagaaaattaggccgggcgcagtggctcacgcctgtaatcccagcactttgggaggccgagacgggcggatcacgaggtcaggagatcgagaccatcctggctaacacggtgaaaccccgtctctactaaaaatacaaaaattagccgggcatggtggtgcgcgcctgtagtcccagctacacgggaggctgaggcaggagaatggcgtgaacccgggaggcagagcttgcagtgagccgagatcgcaccactgcactccagcctgggcgacagagcgaaactccgtctcaaaaaaaaaaaaaaaaaaaagaaaaaagaaaattatatagaaataaaattccagctattccaaaactgcaccttgaatacaggtacagaattgctaaaaccgtgtaccattttgtagttttagcatgcttttgtgtaactgcatctggtgtttgatcctcatgagagccctgttaaggaagggtacatattattgtcctcattttccttcgaaaacacatcagagtttgtattttgactgtcagcattcaaatacaagtcttttatttataaaattttggtctttatactgtggctaaaaatcttaaatcacttgtcatgatttgaaatggtttataccgattttttttgacatttatacacacatacacatatttttaaattgtctataataaaatcatgctcatctttgaaaaaatattaggagtactacagtggatacctacatacttgctattcagcatacctggttttttgtttgttttttgagacagtcttctctgtggtccaggttggagtgcagtggcacgatctcagctcattgcaacctccgtctcccaggctcaagtgattgtcctgcctcagcctcccaagtagctgggactgcaggtacacatcaccacgcccagctaattttttgtatttttggtagagacggggtttcaccatgttggccaggctggtctccaactcctgacctcaagtgatcagcccacctcggcctcccagagtgctgggattacaggttgtgagccactgcacctggcctgtttttaaattcacataaatatgttttatatttttcattagggagaagaaggttgtgtctacaatttttaagacattggggagatttagatgccagtagtaacttaaaagagaaataattgcaaattctttttcctcttgagtatactttcatttaaggtacagtgttctgtaagttacttttaccgttaaacttcttaatgttgcttattgtttgtcttacatttttaggttggatttttcttaagtcacatgtctaataaaaaaaacccttaaatacctcatttattcgtcttcgttagtgaatgcattgttgtacatattagatttttctctttagataactcagcttcccctattaagtgccacatgtattacaaaattttatttatgttttattgtttaataaactcttgagaactagatacattttaatcatttgtaatacttacattttctaaaacacttcatttttccctggtttcttcaacaaagagatgcatgtagtacaaggatagctttacctgtgttagaagattgtttcacacatttacatcaactgcatagtcctgtttttgttgggccctaatgccagcatcactttttgctactgctgtttctgccttaaaggcaatatgcctctgtctagtttgctgattctgatactctttcccctggaaagtaggtaatcaagtttgtgaggagctgtgtgtttaaggagtccataaatccttgtggggagccctaggtgtatagagcatagctgtagggcagaggcctttgacacttattctggatatgcagtggcctttgcctatggggttcatgggtcagagcgctgttgtgacctttgaataaatgggttgttatgataattgttttaagggaggagagttattctgatatcctttgtattgatattgctcttatttattattgagctggatttaagtattaatcatttaaggtcaaatttctaatgtatatatgttcttaaatggctacgacccagttaccatagcaatttagtgaaataactataatggaacattttttttcaatttggcttctcttttttttctgtccaccagggagtaactattcccagtcagaggcgctatgtgtattattatagctacctgttaaagaatcatctggattatagaccagtggcactgttgtttcacaagatgatgtttgaaactattccaatgttcagtggcggaacttgcagtaagtgcttgaaattctcatccttccatgtattggaacagttttcttaaccatatctagaagtttacataaaaatttagaaagaaatttaccacatttgaaatttatgcaggagactatatttctgaagcatttgaacaaattaattagctttgttgttcaactcattgggctaaagaagccaaaagcaatgggttttaatgtagtcgaagccaaattatatttatgaaagaaatattctgtgttataaccaccaaatacagcccaattctgactagatgatggaagaacctgtcccatcagaggtccagcatgaggtccagcagaggtccaccagaggagttcagcaatttgctgctcttagggcagggatcaattccttaatatcttaggaagactaggtattgacagtaatggtgacaaagcaatgaaaaggaaaggaagaagtgataagacgtggcagcaagctgaagtatgatgagtaaagaataggaatcaaagtatgtggagtgttagagaaaacctggatttagatccagattctagtcctatctctgtcattaatctattgcgtaaccctgagcatatcatctacctctctttgagtttgcttgtcaataaaatgaagagactttgaaatctgagacttcctggataagtactaaatacagattatgtcactgatgtctgcctctatttatttctcccttttaccctaatctctataagtctacctcagtcatcctgatcctattctacttctctgatgttgttgtcagataggtgtgatcatcctcatcagatcttttctgtattcttagagacagataactttatcaaagaccacagatttattagtatagcatgttaaagtcttctaaagagtctcattgatgctcttttcatctcagtacaatttttaaaactgctgaatgcaaggtactgagctgttggaagtgactgacagatgaatgtaacagattcatagagaaggaaaaaggaagaaaaactcatgctcttcctatagtattgatatcagtgtaagagccaagagaaaggtataaagtatcatgcagatattaagggaaagaaaacattcactttagtaatctttcctcattttctagtttcctcttatgtactatgatttaatactgtagtaaagttttaataaaatatgagctatatgtaattaagtgggaggttgtggggctaggcacgaggctcacacgtgtaaccccagcactttgggaggctgaggcaggcggatcgcttgatctcaggagttcgagaccagcctggacaacaaggtgaaaccccatctctactaaaaacacaaaaattagctgggcatagtggcacacacctgtagtcccagcttcttgggaggctgaggcaggagaatcgcttgaatccaggaggcagaggttgcagttagccgagatcatgccactgcactgcagcctggacatcggagcaagactttgtcttagaaataaataaataaatataaaataaaataaatgggaagttgtgtatataaattataaatgctacattcagaaaagcttttgaaggttgtcagacagtttcttaaaggaagttcaccagttctttattgaacattgaagaaaacatacagtttagactggcattaaaactgaaagaagtggccagacgcagtggtagacgcagtggttcacgcctgtaatcccagcactttgggaggtcaaggtggatggatcacctgaggtcaggagtttgagatcaggctggccgacatggtgaaaccctgtctctactaaaaatacaaaaattagccaggcatggtgatgcgtgcctgtagtcccagctacttgggaggctgaggcaggagaattgcttgaagccgaaggtggaggttgcagtgagccgagattgcgtcattgcactccagccagggcggtaagagtgaggctccgtcttaaaaaaaaaataagtaaataaattaaaaactactgaaagaagtattacaggcaatgggaaatagcttgagtggaagtgcagcagaaggaaaaagctggacaagaatgtagtgtcagagaataggtatggaacgtgtgagtgactgttagaggatcttgaatggggataacagacttgatttcataaatactgagatgtcatgataatacttgaggactaaaccatgttttaaggacagttgtatgcaaagttgtaatcgcaagaggaaaaaatagtggaaaagaaaccagtaataaaacttgccttaatgcaggtatgctaagacaatcaaatgggatttcattaattttttatttgccatttatagccaaagattttgtaaaagttttgagcccagtcaggtgaaatagtctcagaaagaaagaaaagtgaatctgagacttggagacattaatgttgatattttggttttaaacgtgttttaaatccggtaaaagtgagcttctcacatgacaatattcagtgggtacttgggagtatgggttcgaatctaggtaggagatatatcgatattttgggcatcatcaggaaagggagagtagttaagcctttcatataaataatggtgtggcgtttgggcatgggaagtcttggaggaaaggaagaaaaggagagggtgaggactgagataagaatggcaacttgggtttaggaagaagaagaggaatcaatgtagagaacagatagtgctgaaaaatacagcatcttctgtagggattggcagctttttcttgatttttgtcttaatatttctaagagatggaaaaagctactatattctagacatttaacagggttaaaaatgttactaaaagatgatcaatgtggttttcattcaagactataacaatatgtatatatccaaggaaatttaattctgacttaaaaaaattgttttgcttgtatagatttagggacacaagtgtaattttgttacatgcatagagtgtatagtttcaagtcagggcttttaggttgtccatcatctgaataatatacattgtacccattaagtaatttctcatcttctactcaccgtttcaagtctccactatttatcattccattctttacattctgattttcatttactaggtgtattagtctgtttttgcattgctttaaagaaatacctgagactgagtattaaacaggtttaacctgttttctttatgaattcttctttaattggctcatggttctgcacgctgtacagaaagcatagcagcatctgcttctggggaggcctcaggaagcctccaatcatggctgaaggcaaaaggggagcatggtgagaatgggagcaagaaagagaaggagtggtggggagaaggtgccacccacttttaaatgccagctcacttaccaccaagaggatggcccaagccattcatgtgggatctgcccccatgattcaagcttcttccaccaggccccacctctagcactggggattacaattcaacctgagatttgggagggaaagatatccaaactatatcactaggtctggatcttgttatttattttttggaacatagtcatatatatccaaggatatatattgtagaagtccacagaaccatactaatattggacttctgcttagttaggtcttatctatctgaaacatgatattcatattgcagagaagattattttctttagtgattgaggaaatctttactacttatacatttttaatataatactataatatttgaagatgcacattttagatgtagtttaattgaaacctggaaatactattaatttgctttttaaagtcctaaaatcaggattatcagattctgaattaatggagtttaaatcaaaaagattacaaggcagtttttcagttttattctggttaattttatcacagctttggaatcctactttgtttatttgcttcttgaagttagatttcccagtgaaatttcagtatcacataaagtcttatgaaatggctcattgcactttgaactttgagtcaaggaagtgaaatttattgatagattgttggtgtaatatttatcctgtttgtggtagcttttttgaataataagtgtcttagaagaccatgttggagtagcctgcatgcttttatcaaacatattaattatgtgatggctgatactgctttagatattacatagaaatagtagtaggtgtttactaaactggaaatttcatttaacttggtttagctttgccttgttctcagtcacattgataaaaatgtaagacttttgtttatcttttagaataatgacaccttttggtgctgagaattttttgttttatatatatatatatatatacgtaatataaatacaaaatatatttaaatatgtataatatttctcatacactttatgtaactttgtgttcctgtttctctattatcttggcatgttttcttcaaatggcacttcttaacctcctaaggttaataaatttctttgtaatggacttttgttttctaattcctcagcgtatgacaaatgaattatactttgtcaaattatttaggtaactttcagtttttgaagtcctgggatcataacattcatcagtctttaatttctgtcattaaggtcattagctataaatgaatttatgagtagatttaaaaaataaaacatacaatccttcccttaacacactttcccaccatttggttcaactgctagtgtaaaagcatgatgaattttgagaagttatattttaccagttactttattttttaccagttatttaaaacagacatgagccaaagccagaatacttgttaatgaaaatgaggtgttttggaggaaaggaaggttgtgctgcagtttttacttgaaatctgttacatttctttacagaaatttcaaatctcttgtttcctgttatgatggtggcattatatacctttaaaatgtgagctataggaaaatgaatgatggttaattttttaataaatatttagacttgtgtttttgaaattttttataacattgttataggttttatcctctttctcttgtgaacatgtagtgatttgtattttgtgatctttgccgcatgctagagacttaagaatactatagcaaatatctgtcttctttacatttaaaaatttttcgtgactactccctgttgatatctgtcttaaaagttacttttgatgtagttcacaaatgtaccagataattatttcatcgtttttaatgcttaaagtttttatttgtattaggatttttagtatgattttaatgttaaagttttgaagttactctgccactagaagtctaattttgggacttactattcatgaaataggaattgacttttatataagtaataggaccttattttgaaggttcaaactggagaaaatcttacattgtttatatttttatttcatttatttcagttgatttgcttgagatcaagattgcagatacagaatccatatttcgtgtatattgctgatattaatcattaaaatcgtttttgacagtttgacagttaaaggcatttcctgtgaaataatactggtatgtatttaaccatgcagatcctcagtttgtggtctgccagctaaaggtgaagatatattcctccaattcaggacccacacgacgggaagacaagttcatgtactttgagttccctcagccgttacctgtgtgtggtgatatcaaagtagagttcttccacaaacagaacaagatgctaaaaaaggtttgtactttactttcattgggagaaatatccaaaataaggacagattaaaagctatattttattttatgacatgtaaggaactataatttgttttctattagatctgcaggtgttttgcttactctggcattggtgagacattataagggtaaataatcctgtttgaaggaaaaggccttatggcattgtaacatgagaggaatttttcttaacaaggatggttaactgagaagaaattagcatgggaccaatattttaaaaattttggtctataggtagaaatgagatctgttctgtggtcttatgtagtgacacaaaccactttttctccattttggcttatgtttctttttctttccttttttttttttttcctttttgttagagacagggtcttgttctattgcccaggctgagtagctaagactacaagcatgtgccaccacacccagctaattttttttatttttatttttgtagggacagggtctcactatgttgcccaggctggtctcaaactcctgggcacaagcagtcctcacgctttggcatcccaaagagttggaattacaggtgtgcgccatcatgcctggccttaacgtttcttaagacttgattattttctatttagcttctgtggatttactgattaattttttaactaggagagaaatcagtatgaagaggaagtaataaagaatgaaaacatggtatttaaatgtgcaggtttagaaagttaatgaagtttgaatttgattgatctgtatttagagaaggcaacgtcttattattttaaaaccaactatccgccctgtgcggtggctcacgcctgtaattccagcactttgggaggctgaggtgggcagatcagctgaggtcaggagttcgagaccagcctggccaacatggttaaaccccatctctactaaaaatacaaaaaaattagccgggtgtggtggcaggcgcctgttttcccagctactcaggaggcttgaggcaggataattgctgaacccgagaggcggaggttgcagtaagccaagaatgcaccattgtactccagcctgggcaacaagagtgaaactccatctcaaaaaaaaagaaaaaaaaaacaacaactatcttcatttaaaatattaaatgtgaatatttaaagtgagactaaggtgcaacatttttagatagtaatgaagaaaaggactaactttgtagtgttgctgccttgttaaacatactagatagcatattgccaatctttaaacattctcaatgataggatttatttactttttctgatttttagcttttcttttgaaagaaaataagaggaagtttcatttactgcaaaattttaaatgctgctttgatgtatcagtagagatataattttcctttatccagaatccaagtagctggaaaaaaaaatcaaaatatgctgaacttttttttttttagccagaaacccatttcctatcgtctgtacaaataaaagttaaatatatctcaataacttagaaaaattattttttgataatccaggaagtattagcaactgttttaaaattaagataactagtaagttttatttagctttcaaaaataggcatctacatcatcatctctgcatacctttaggaatttcctaattcttatttcccttcatctgtactttaacacatgcaaaattgaaggttagattaaatatttatgatttatttgtttatccttgactacataaatttccattttattgattttccctgccttatttaagaatatgctatgattaaaacacaaaaaattttagtataacccatatatatatagaattcacctttttgttatttaaatattattggcttattttcttctaagtaaaatacaattactggctaaaataattgaaataagcaaaaaaaaaattttaaagaccttgtatacaagattactttgccaggtactgttaaaagatgcaatgacatttaagacgtaacatccttaaggatcttattttctgggggataaaaaactttaagataaattagaataaaagatttaaatggcattttaaggtaccaggtaccagataagatgtcacaaggctgtatatcattaattgccaaatgatttatacaggccagatttctttgttggtcaatagaggtttaaagtgatgaacttctgttgtgtttttttattaagaaggtattatcttattagtaagaagtgattttttttaagaacaagcattttataacatcaaaagaaatcagtagtactctttcctaccccctcatatttattctgaaagtattcaagcattatattgtcatgtaagaaactggagcttctcatgtttgtattgctgtagaagtaaacatgtatttgccatgcgtcatcagggaagttgcactcaccgtccaagaacttttgttaaagtaaatcttggaataggtagctcatttgaaatgtagaaaaaattaaatccatatctgaattttgtttatatgtatgtacacgtaaactaaaaacgtatttaaagctagtattagatgagaaaagaggtttttttacttaaaattttaaggcaaaagtagtttatcttagatcttgtgagattgtatttttggtttaaaatttgagaatttgagtgaagaaaaatcatgtgaatgaaaatgcaacagataactcagattgccttataatagtctttgtgtttacctttattcagaatatcaaatgatagtttattttgttgactttttgcaaatgtttaacataggtgacagattttcttttttaaaaaaataaaacatcattaattaaatatgtcatttcatttctttttcttttctttttttttttttttaggacaaaatgtttcacttttgggtaaatacattcttcataccaggaccagaggaaacctcagaaaaagtagaaaatggaagtctatgtgatcaagaaatcgatagcatttgcagtatagagcgtgcagataatgacaaggaatatctagtacttactttaacaaaaaatgatcttgacaaagcaaataaagacaaagccaaccgatacttttctccaaattttaaggtcagttaaattaaacattttgtgggggttgttgacttgtatgtatgtgatgtgtgtttaattctaggagtacagctgatgaagaacttgcttgacaagtttttaacttatgtattatttcgaagcagtgtttacgtagcagtaacatgaaagtttctaataaaatacccaatgtacacagcgtcaaaaaagctgcatttttccttttcctaattcttcgttgtttgctgaaatctggggcaaaggtgcgggagggggctaaatgactgggatatgaagtaggaatgggagaggaaagaaatagatgggaactcagtcatttgggaatgattcatatggaatgtttttactgcttccactcctgtctgccttccaatttattctcaatccctcagagtgatcttaaaaatagacttgattgtgtcacttctgtttacactttataaggaccttgtgtttttttttttaccatgacctacaaggcccagcataatttagcacagggctacctcctacatcagcactagtcaccttctctccttgtttcttgagattcagtcatactggtctttcttcagttcttcaaaatgctaagcttctgcctcttctagtctttccagttattttccttctccctgtaccttttcatctcagccttttcccctgaccttccatagctatcttcatatttccagccttagcttcaatctcatattctctgaagtcctttgattgtcctcccgttattctttttttaaaaatcctatttccttatattgtatcttagaattatttggtttgtttcatttttgcctatgtgtgatatatgtatttctacataggtatatatatctacttatagacaagaattcttcagattaaaaaaatctgatttgtaaacattcccaagtggttgtttaccatttttttcttcccccttcctatttcttattctacctgattttcccctgttcattcaccacactcgtttctttctcttttttactctctcttaatttttcattcaatttttataacatgtaataaatctaactgtagcgtctgagtattaagaatattgctagtaatacttcacctgtaatcccagcactttgggaggctaaggcaggcggatcacttgaggcccaggagtttaagaccagccggccaatatggcgaaaccctatctgcactacaaatacaaaaattagctgggcatggtgtcgcacacctgtaatcccagctacttgggaggctgaggcacaagaattgcttgagcctgtgagatggaggttgcagtgagccgagatcacaccagtgcacgtgcacttcagcctgggcaacagagcaagactctgtcttaaaaaaaaaaaaaaaaaaaaaatatatacacacacacacacacacacacacacacacacacactattactaccaatatacatacatatatgtatgtatgtatgtatgtatattggtagtaatagtaatacttgggcccctgcacgttttaagtgaaaatagatctaatattaaatgtctttagcccttaaattttttttaagtgttcagaagtttccctttaaaaaaatttttaatatataataattgtacatatttatgggatacagagtgatattttcatgtatgcagtgtgtgatgatcaaatcaggataattagcatatggatcacctcaaacatttgtcatttctttgtgttaggaacattcaaaattctgtcttctagctatttgaaaatatacagtaaattattgttgactagttacagttctatagaacactataatttattcctcctgtgtgtaattttttatcttttaaccaacatctccctatcctcccctcccactccctttcccggcctctaataaccacactcttatgagctcaacttttttagcttccatatatgagtgagaacatacggtatttatctttctgtacctgacttattttacttaacatcatgtcctccgggctagacattctctttagaatccacaggtttcctttcttttctctaaatctgcattttgctcagccattaacttttaaaatgtctttttccctttagttttattgttttctattttaatattgcaagatgttttatatttgtgattacaaataaaaactccattattagtaaacaaatacaatgtcatatagtagtaagtgctataaaaaatagacaggatagaaagtaatcttggtttgtatgttttttgttttttagcaaagatgattagagaaggcccaaccaagcagataacatttaagcagaggcctaaatcatataagtgagttatacaaatatctgggaaaagagttaagagtacagatgcaaaagcccttagacaagagaatgagcttggtatatctgaagagtggataagtcattttgactgaaacagagtggacaagaaaaccagtccaagtgtaaagacactagtgtgtgttcagcataggaaggatgtaatctgaattttgtgtttaatattccctgtgttcatgctttcaaaatacagatgagtgaggaaagtagggagaaggggtaataaaggaagctgagagatcagttaagaggtacttgaatagtttagtaaagatgagagaagatgtttgcttcttgttgcccctcactgcttagaatagtggcagtgaagggtaacaagaagctgtcagattaacttaaagagtttactgatgcagtggatgttggttgtaagagaagaattgataatgactcttggataataggggagggaggggctgtcaatataatataatgaagaagggatttgaagtcatttctgatttaaatctcacatccactacctacttttaatagatatgtagcctttaacaagttccctaacctttctgggccttagctacctccccttggaaatggaaatacctaacatgtaaggttgttttgacagttattttcactaggcatgtaaaggcacttgactctctgttatagaccactgtattatgttaatgtccctctccttcctccctttaggtaaagtttttagggctaataaatcccaaatatcaatgttgatcagtagtttgtgtttgtgtagtgttgtttatatcaaaaactacattgaagccgggcacagtggttcacgcctaaaatcgcaacactttgggaggccaaggtgggcctcccaccttgaactaaggagtttgagaccagcctgggcaacatggtgaaatcccatctctacaaaaaatataaaagctagctgggtgtggtggcatgcacctgtagtcctagctacttgggaggctgaggttgatcctgggagtttgagcctgcagtgagctgtgaagatgccactgcactctagtctgggtgacagagcaagaccctgtctcaaaaacacacacacacacacacacacacacaaagaaatacattgatttttcacataggtagtaagagaaacattctttttgaactcagctgtttgtgaattgaattttgtaattcaaatgctatattatgtaaactattgatgactttcaatctgcatttattttgtataattatttagttaatatttgccacttatattccttaaaaaataaaattgaggttgggcgtggtggctcacacttgtaatcccagcactttgggaggctgaggcaggcagattgcctgagctcaggagtttgagatcagcctgggcaacatcatgaaccccatttctactaaaatacaaaaaattatctgggcatggtggtgtacacctgtagccctagctgtttgggaggctaaggcacgagaattgcttgaacccgggaggcagaggttgcagtgagccaagatcatgccactgcactccagcttggcaacagagcaagactcttgtctccagaaataaaaataaataaattgtattaacatcctgatagtttatctgtttagtacctagcaagaaagaaaatgttgaacatcttaagaagagggtcatttaaaaggcctcttaaagatcatgtttgttacagtgcttaaaaattaatatgttcatctgcaaaatggaataaaaaatctgttaaaaatatatttcactaaatagtttaagatgagtcatatttgtgggttttcattttaaattttctttctctaggtgaagctgtacttcacaaaaacagtagaggagccgtcaaatccagaggctagcagttcaacttctgtaacaccagatgttagtgacaatgaacctgatcattatagatattctgacaccactgactctgatccagagaatgaaccttttgatgaagatcagcatacacaaattacaaaagtctgaatttttttttatcaagagggataaaacaccatgaaaataaacttgaataaactgaaaatggacctttttttttttaatggcaataggacattgtgtcagattaccagttataggaacaattctcttttcctgaccaatcttgttttaccctatacatccacagggttttgacacttgttgtccagttgaaaaaaggttgtgtagctgtgtcatgtatatacctttttgtgtcaaaaggacatttaaaattcaattaggattaataaagatggcactttcccgttttattccagttttataaaaagtggagacagactgatgtgtatacgtaggaattttttccttttgtgttctgtcaccaactgaagtggctaaagagctttgtgatatactggttcacatcctacccctttgcacttgtggcaacagataagtttgcagttggctaagagaggtttccgaagggttttgctacattctaatgcatgtattcgggttaggggaatggagggaatgctcagaaaggaaataattttatgctggactctggaccatataccatctccagctatttacacacacctttctttagcatgctacagttattaatctggacattcgaggaattggccgctgtcactgcttgttgtttgcgcatttttttttaaagcatattggtgctagaaaaggcagctaaaggaagtgaatctgtattggggtacaggaatgaaccttctgcaacatcttaagatccacaaatgaagggatataaaaataatgtcataggtaagaaacacagcaacaatgacttaaccatataaatgtggaggctatcaacaaagaatgggcttgaaacattataaaaattgacaatgatttattaaatatgttttctcaattgtaacgacttctccatctcctgtgtaatcaaggccagtgctaaaattcagatgctgttagtacctacatcagtcaacaacttacacttattttactagttttcaatcataatacctgctgtggatgcttcatgtgctgcctgcaagcttcttttttctcattaaatataaaatattttgtaatgctgcacagaaattttcaatttgagattctacagtaagcgttttttttctttgaagatttatgatgcacttattcaatagctgtcagccgttccacccttttgaccttacacattctattacaatgaattttgcagttttgcacattttttaaatgtcattaactgttagggaattttacttgaatactgaatacatataatgtttatattaaaaaggacatttgtgttaaaaaggaaattagagttgcagtaaactttcaatgctgcacacaaaaaaaagacatttgatttttcagtagaaattgtcctacatgtgctttattgatttgctattgaaagaatagggtttttttttttttttttttttttttttttaaatgtgcagtgttgaatcatttcttcatagtgctcccccgagttgggactagggcttcaatttcacttcttaaaaaaaatcatcatatatttgatatgcccagactgcatacgattttaagcggagtacaactactattgtaaagctaatgtgaagatattattaaaaaggtttttttttccagaaatttggtgtcttcaaattataccttcaccttgacatttgaatatccagccattttgtttcttaatggtataaaattccattttcaataacttattggtgctgaaattgttcactagctgtggtctgacctagttaatttacaaatacagattgaataggacctactagagcagcatttatagagtttgatggcaaatagattaggcagaacttcatctaaaatattcttagtaaataatgttgacacgttttccataccttgtcagtttcattcaacaatttttaaatttttaacaaagctcttaggatttacacatttatatttaaacattgatatatagagtattgattgattgctcataagttaaattggtaaagttagagacaactattctaacacctcaccattgaaatttatatgccaccttgtctttcataaaagctgaaaattgttacctaaaatgaaaatcaacttcatgttttgaagatagttataaatattgttctttgttacaatttcgggcaccgcatattaaaacgtaactttattgttccaatatgtaacatggagggccaggtcataaataatgacattataatgggcttttgcactgttattatttttcctttggaatgtgaaggtctgaatgagggttttgattttgaatgtttcaatgtttttgagaagccttgcttacattttatggtgtagtcattggaaatggaaaaatggcattatatatattatatatataaatatatattatacatactctccttactttatttcagttaccatccccatagaatttgacaagaattgctatgactgaaaggttttcgagtcctaattaaaactttatttatggcagtattcataattagcctgaaatgcattctgtaggtaatctctgagtttctggaatattttcttagactttttggatgtgcagcagcttacatgtctgaagttacttgaaggcatcacttttaagaaagcttacagttgggccctgtaccatcccaagtcctttgtagctcctcttgaacatgtttgccatacttttaaaagggtagttgaataaatagcatcaccattctttgctgtggcacaggttataaacttaagtggagtttaccggcagcatcaaatgtttcagctttaaaaaataaaagtagggtacaagtttaatgtttagttctagaaattttgtgcaatatgttcataacgatggctgtggttgccacaaagtgcctcgtttacctttaaatactgttaatgtgtcatgcatgcagatggaaggggtggaactgtgcactaaagtgggggctttaactgtagtatttggcagagttgccttctacctgccagttcaaaagttcaacctgttttcatatagaatatatatactaaaaaatttcagtctgttaaacagccttactctgattcagcctcttcagatactcttgtgctgtgcagcagtggctctgtgtgtaaatgctatgcactgaggatacacaaaaataccaatatgatgtgtacaggataatgcctcatcccaatcagatgtccatttgttattgtgtttgttaacaaccctttatctcttagtgttataaactccacttaaaactgattaaagtctcattcttgtcattgtgtgggtgttttattaaatgagagtttataattcaaattgcttaagtccattgaagttttaattaatgggcagccaaatgtgaatacaaagttttcagtttttttttttcctgctgtccttcaaagcctactgtttaaaaaaaaaaaaaaaaaaaaacatggcctgagagtagagtatctgtctactcatgtttaattaaggaaaaacacttatttttagggctttagtcatcacttcataaattgtataagcacattaaatagcgttctagtcctgaaaaagtccaagattcttagaaaattgtgcatatttttattatgacagatgtttgaagataattccccagaatggatttgatactttagatttcaattttgtggcttttgtctattattctgtactctgccatcagcatatggaaagcttcatttactcatcatgacttgtgccatataaaaattgatatttcggaatagtctaaaggactttttgtacttgaatttaatcatgttgtttctaatattcttaaaagcttgaagactaaagcatatcctttcaacaaagcatagtaaggtaataagaaagtgtagtttgtacaagtgttaaaaaaataaagtagacaatgttacagtgggacttattatttcaagtttacattttctccatgtaattttttaaaaagtaaatgaaaaaatgtgcaataatgtaaaatatgaagtgtatgtgtacacacattttatttttcggtatcttgggtatacgtatggttgaaaactatactggagtctaaaagtattctaatttataagaagacattttggtgatgtttgaaaaatagaaatgtgctagttttgtttttatatcatgtcctttgtacgttgtaatatgagctggcttggttcagtaaatgccatcaccatttccattgagaatttaaaactcaccagtgtttaatatgcaggcttccaaaggcttatgaaaaaaatcaagacccttaaatctagttaatttgctgctaacatgaaactctttggttcttttatttttgccagataattagacacacatctaaagcttagtcttaaatggcttaagtgtagctattgattagtgctgttgctagttcagaaagaaatgtttgtgaatggaaacaagaatattcagtccaaactgttgtaaggacagtacctgaaaaccaggaaacaggataatggaaaaagtcttttaaagatgaaatgttggagccaactttcttatagaattaattgtatgtggctatagaaagcctaatgattgttgcttatttttgagagcatattattcttttatgaccataatcttgctgtttttccatcttccaaaagatcttccttctaatatgtatatcagaatgtgggtagccagtcagacaaattcatattggttggtagctttaaaaagtttgtaatgtgaagacaggaaaggacaaaatagtttgctttggtggtagtactctggttgttaagctaggtattttgagactacttccccatcacaacaacaataaaataatcactcataatcctatcacctggagacatagccatcgttaatatgttagtgactatacaatcatgttttcttctgtatatccatgtatattctttaaaaatgaaatttatactgtacctgatctcaaagctttttagcttagtatatctgtcatgaatttgtaggatgttccattgcatcagaaaacggacagtgatttgattactttctaatgccacagatgcagattacatgtagttattgagaatcctttcgaattcagtggcttaatcatgaatgtctaaatattgttgacattaggatgatacatgtaaattaaagttacatttgtttagcatagacaagcttaacattgtagatgtttctcttcaaaaatcatcttaaacatttgcatttggaattgtgttaaatagaatgtgtgaaacactgtattagtaaacttcatcacctttctacttccttatagtttgaacttttcagtttttgtagttcccaaacagttgctcaatttagagcaaattaatttaacacctgccaaaaaaaggctgctgttggcttatcagttgtctttaaattcaaatgctcatgtgacttttatcacatcaaaaaatatttcattaatgattcacctttagctctgaaaattaccgcgtttagtaattatagtgggcttataaaaacatgcaactctttttgatagttatttgagaattttggtgaaaaatatttagctgagggcagtatagaacttataaaccaatatattgatatttttaaaacatttttacatataagtaaactgccatctttgagcataactacatttaaaaataaagctgcatatttttaaatcaagtgtttaacaagaatttatattttttattttttaaaattaaaaataatttatatttcctctgttgcatgaggattctcatctgtgcttataatggttagagattttatttgtgtggaatgaagtgaggcttgtagtcatggttctagtgtttcagtttgccaagtctgtttactgcagtgaaattcatcaaatgtttcagtgtggttttctgtagcctatcatttactggctatttttttatgtacacctttaggattttctgcctactctatccagttgtccaaatgatatcctacattttacaaatgccctttcagtttctattttctttttccattaaattgccctcatgtcctaatgtgcagtttgtaagtgtgtgtgtgtgtgtctgtgtgtgtgtgaatttgattttcaagagtgctagacttccaatttgagagattaaataatttaattcaggcaaacatttttcattggaatttcacagttcattgtaatgaaaatgttaatcctggatgacctttgacatacagtaatgaatcttggatattaatgaatttgttagtagcatcttgatgtgtgttttaatgagttattttcaaagttgtgcattaaaccaaagttggcatactggaagtgtttatatcaagttccatttggctactgatggacaaaaaatagaaatgccttcctatggagagtatttttcctttaaaaaattaaaaaggttaattattttgactattcggttttaaactttttattcaacaaataccaagtccctgctgtatatatgggtttggaatacattagtgatcaaaacacaccctctatccctgcccttgaagagtttacactccagtagaggaaacagaatttacattaacaattataaattgtgatacatgctgtggaaagtgaggtgcatgtgataatggttatcaaacattatgctccccaaaatttccatcaccttgcagttgaatgaggcctatgtaactagtttattctaatgtaatacagaaagtagtgtgacactccactttctgtaaaggcaatgaaaaaaatttaccatccagtttctctcttcccctactgctgtgattaaggattttgcatgttctagatggtgcagctttgtcagcctgggtcttgagtgatactggagcagaactccctcaaattgttccttctgccacgctaaacttgttagatattagcataaataagaaataaaccatttagactgatactttgggacaattttttatcacagtgtaagttatatcctgactaaaacagtgctttggaaagatcagggaagggtttcttgagctacaaaagggagttaagaatgaagcaaaatgaaatatggcatctttaaatgacatgatgcaataaactctaaattgcaagttattcaatagttactgagcaccagatatgtgtcagacactgttctagatgcttgggatacaagtgggtgaacagcaggaccttgccttcatggagcttacattctagcaagggaaaatagtcaacatactatatgtaaggtaatgcgtgctatagcagaaatgaaaggtaagggagctcaggattgctgggtggagagatttcagtgttgaatggtgtagtccagaacaggcctcactgggaaggtaagatttgaagactgctgactaacagtggcattgggattttccttcattctttcaaccagcgagatgcactcagaaccctctatacaattttattctcactttatacaactctgtacattagttctgagtttttaagatgattgttggcatatctagggagaatttttaggaataccacccaaaatagtcgcaatgttctaaaaccattttgttttctaaattggtttggcaaactctatacaaacagtctgttccttttcattctccaagttgagtttttaaatttaaattatactctttgtgcattttgacaatacttacctcttttcagaagacattaaagttctgttatggccttaaaacatttctgtaaagctgaaaggaaatatcatttatgatttattgatgggaaacagttacaaattttgagttacttgacaaacagaagggatgaaatttatggcctagtgttgtgttttcattcttaacccataagcaaaaatctctggaaaagtaccaatatctagtaaaagaaatattttttcacaaaaagtattttctattttcccctcacctcttacctcgtctcacctcaaagttcaagaagcttaactttgtgatcaaaggaaaatagtataattgaatatttgatactatagaaatttgcaactgtataagggcattattaaccttttgctagtgatcagtttcctatcagggcagccacataaaattaggcatgacactttaaaagaaaatgttgactcttaacttttcctcctctaatgcttaattttaaaatagatttaagcaactttaaagacattttcctgagcaactgcattttgttttcattctgaatttaatgagactctttttttctttaacattttactttgctttagaaaggatttaaggcaggtgaatgtgtttcccagtgtgagaaaaattgtcatgtaaatttagaaaaaagtattgtatatgtcccttgattttggcttaagagttagaatttacttagaatgtttcctgacccaacctcattggaatttgaaagtacattccaatagtattgtgagctgctcctttaaacattggtaagtaggcttcaaacttaattttcaaggaaataagccatgcttttactgtagggtttattaatctgaaatacctgagaatgaaaatagttatatgctcctatctaataatataaacagttaaatgtgacctgtaaatattgtgaaatttagcaaaaatataacctgtaaaaataatctctagtaagctaatattctctcagtaataaaacctagagagctaaagtagcccaattaactgacattagaacagatcgtgatatgtggaagaactattagtgaattatagtcatgtttatacttctcttttcaattataatcatgtccttgagatctcattttccagtccttattacctataaggaagagaaatatatgtaaatttcacaaatgcatacgaaaattaccaaacttcttaagtgttattcggtatttctgcagagatatcattaacaggaaagcccaatattttacatggttatctttaacaatggaagtacagtggttgtttaattaattagctaatacttcatttactgtgtatagtcataattcataagaataatacatatgtcttttaggattattagtactgtatattaaataaatgcttgaaagggaaaataccttttagtgtttggtaaaagagtaggcataaggtaaattttcccttctgttagactcagcagaactattcaatgtgtttagctgtccttggagaagactgagccattgttgctgtaaaaatccaatagggttaaaacaaaaatatcactttgaacatgatttacttggctaggagacacttgaagctttaagcaactcaaatctttctctagaaaattaaacacaattctacctcagaaaacttgaagacattgacaattcataggaattctgtgataagtcagctcacctacctaaagaccaaagtgaaggcgcacagcaagagaggaagctgaagtaaggagagaaaagaaaacagaaggaaaagcatggtaagagcccaaattaactctgactactgggggctgctacaggggatgggaagagaatagcattgttctgagcccacagtgtgtgtcatgctgcagtagtcagttcacaggcttgacccatccttcaatgattttatctcattttatgcacaaagactgaaagggaacttaaatcatccaggtgtctctcacaactagtaaatagagaagtggatttgaacccacagcagtcttatttctaccatattatgcatactacctcttaaacagaatcaagtttacaaagcaaacaaaaaagtctggccaggtttggtgtctcacacctgtaatcacagcactttgggaggctgagacaggaggattgcttgagcccaggagttcaagactagcctgaggaacatagcaagaccttgtctctacaaaaaagttaaaaaattatccaggcatggtggtgcatgcatatagtcccagatacttgggagaccgagctgggaggattgtttgagcctgggaggttgaggctacagtgagccatgatctgtgccttgcactccagcctgggcgacggggtgagacctcatctcttgaaaacaagtctaaaacaactcacaggtaatggagtcatgacaaattttttttttgtttactgacacaagaaaagcaagctaacacaaggcataaatcctgcaaaatgaacagcaaagaagataaatatttaacaattgttcaagctacaaatgagaaaattatgtatcttgcaacattcttgacaggtaagatgataagatgttggtatatatttttatatcaaaacccagaattacagttctttgatttgctagtttggtataaaatccattaaataaacttgtgccttatttttgcttgaactagaatgcccagactgtttaaagtgattggttctcagttaaataggccaaccggccacctaacaagtatttgttgcatgcctgctgtgtcaagttggaatacaatagtggagaagtgagaaaaggccatagattttacattttagagtgggaaaacagattttatacagagagttgagcaagtgtgatggcttgatgtaggaacaaacttggtcacttaggaaagcgtaagaagagaaaggctagagcagagtaagtgatgggagattgatgtaagataaattttggagaagtaggcaggagaacttctggtttcagccaaggtggaataaaaccactaaattctgtcccctactgatgacaaccatcaataaactttttctacactgttttattcaaactcattagtttatcttattctttgaatagatcttttaccccggcctgattttgtgacatcatcgatgagtcatttggaaaatacaggttcactgagttttgtagattttccagtgttgacacatttcattatgcaatgcagaaaaacaaatcacatttaaaaaaatatcacaacacttttttagagctgacaagaatagtctttaaatatttggaagaaggcagatgatgaaagagagtcaaaacttggaaaagcaacctatattagggatgtttcttttcttctattgtcttaacagcttcgccccaagggtgggccccacttgtggagctgcacaaccacggtgacttgagcagctcacactgagataaatcaagctttttggccagaggaaccagaaaaagagtctcctgtgggccagtggccatggagtatgagggtggggggagggttggggaaatcctgaagacaagagagctggaaaagggaatcctctaattctcagtttgaacttctacaagtcctgggctcactcctgagcttgcatgcacaggacagaccaaagaagcatagcaaaggctttgaaaatgaaacagattggaattatcactcataaatgatgagacaaaacttgcagcctgagcctaatcgagtggattgcctgaatcaattgatcaatcaatcatcaatcaaacattttcagaaaattttaacaggacccagagtctatgcaacacagtatccaacattacttaactaggaagaaccggaaaaatgtgacaaattcccagggaaaaagtcaatcaagagatggtaaccacaaaataacccagatgttggaattatcagatgtaaaaacagctattgtaattatgtttcatgagataaagataaacacacttggaatgaatggaaaggcagaagttctcagcaaggacacagaaattataaaaggaaccatgtggaaattttacaactgaaaggtacaatatctgaaataacatactagatgggcaatagaagaatggaaatgacagaagagtcagcaaacttgaagataactttataaatatccaattctaatcatggctttagagtcttaaaggtggatgaagcttcgaaaagtgaaatatatctgattgtaataagcctcagggagcctgaataaaatactaatccaagtgtatctatgtggctcccacagatacatttgaagaagttcctgttgtttgtcaattacattaagtaaaggaattagcattatcacaggtccaaacatggtgattatgagaatttgctgttacagtgttacacagtcttaatacgtcaaaacagcccaaggtgatgtatgcattgacagagttttctggttgggtccattaagtgtatacctgcagtaaaaagcaatttaaaatttagcaaagtcatcactagatcactgacacactcatccttagagacagtacatggtaattgcttcgctcacctgctcatattaacactttgattcagcctaacccttccgattcagcctttgcaacagcactgtttccaaatgtgacgttattacagagatgtcatacaaaaattgacctatcatgtaggcacaatgcatgcttttcaatattacagcagaaaaaaaaatgtgatatttaatgctgctagtgcctaggaatctggtatgagaaaacattaagatgagtttggaggaaaactgagctggtattatgtttggagaaatgacttcctgattcagaaagagaatttcaagactttagaatgcctcccattgttatattagaaccatattacttgtaaaaggtagtataaatttttgtaatggtgataattctgggtttaatagtttaacaagttttgccatttaattcccataatataggaagtacaattatatccatctcatacacaaggagctatggtacagaaaggttcaataacttgttgaatatagcagatctagtaaatggcaaagtcaggatttaaatgtaggtcaatttgattgccaagcctgggccatttactactgtgttatatatgttacttcctataaaaacttaacaagaaggtctttcattttcaaaccgaaatggacagaacactggtgtaagcagtgttctgaagcttttggtctcaggattcctttacactcttaaaacttactgaggatctcaaagggcttttgttattgatatttactacataagaaatgaaaactgagacatcatctgattattaaaaaaacaagctaatcacatgataatataaataacattgtagcgaaaataaccatgtattctaaaacaaaaatgttagtgatgaggtggtgttttgtttttttcatttttctgaatttttttttttttttttttttgagactgagtcttgctctgtcaccaggctggagcagtggtgcaatctcggttcactgcaacctccgcctcccgggttcaagtgattctcctgcctcagcctcccgagtagctgggattacaggtgtgtgccaccatgtccacctaatttttgtagtttttagtagagatgaggtttcaccatattgatcacgctggtctcaaactcctgacaggtgatccacccacctcggcctcccgaagtgctgggattacaggcatgagccaccacccccagcagacatacttcattatacagtgcaaaaaaagtcacattttaaaaatatcaccaccgagctcaccaggatagtctttacatattcggaagctgtcaagttcatggtagcaggtataagattttaaaaatactaattttggcttaaaagcttgaattttatcacttataacccacaggggtcatgggccacactttgaggatcactggtgttagaggtttggttggagagacgcaagtaagagaacatttccctaacatgcccaaacacattccttttcagagtgctgaaggaatttgaaaatgaggtctcagaattaccagcagtaattcctgataaattaagaaaaatgggagagagttcagagacaaagacatgagaaaagattgccataactctccagaaggatggattctgggtaatgaaggccagtatgtttaacactgattcccagaaaaagactttaatatattcagtagcagttagtttaagaacattagaagataattcggtgattaccagatgtcaatgagggctaggtaggtcatttcaaagccttctcaaatttcattttttctttatgatcacctgtcacagtgctttacgtgatgtacatacaaaaatatttgcataactgtataaaacagttgaataataactgtatagcatattgcttatataaactgcacaaatctcatttgaataaaaaccatttataaagtacttgcagtatgcaaaatgtgttgggcaaagggcaggtctgagaggcacacacgaggaaaactaaaacagaacagaagtctaatggtattttcaagtgttataaaatatgtgaagtctgccttgtgagagaaggtagcattggcttgtggaaagagcatagcacaggaaattagaacatctggttgctcatcctggctttaccatcaacttaatgaatgacctggagtaagttacttcacttcgagacctatgctctatatctgcaatattgaaaatgctggataagataatctctaaagccccagaaaaagatggagttgtactctttcactcccaggaacatatactggaacttatgagtagaactttggagagaccaagtttgcctcacaatgagtaatattctagttctgcactgtcgtatagtgacttcagtcactaagctacatgtctctatggagcacttgaaatgtgactggttcaaagtgagatttgctgtaagtataaattacacatcagattttgaaaacttagtataaaaagtagaaggcaaaatatcttgtcaattttttacattgattacatattgataatatttttgatatagtgagttaaattatatatataaattttttttttttttagatggggtttcactctgtcgcccaggctggggtgtggtggtgtgatcttggctcactataacctccaccacccaggctcaagccatcctcccacctcagcctctcaggtagctgggaccacagttgtgcaccaccatacatggctaattttctgcatttttggtagagatagggtttcaccatgttgcccaggctggtctcgaactgctgagctcaagtggtccaccttccttagcctcccagagtgctgggattacaggtatgagccacctcccagtctaaattaatatattttaaaaacatttcacctgatttcttttactttttaagatatatatggctaatggaacacttaaaattacatatatggctcatattatatttctactggacagggtaattctagctaatagagtttccaacaaaataataataacttgaagaggaacctaattttacttttcattttgcattttgaggtacacaagcagagactgggtcatagttc

SEQ ID NO: 806 - DNA, 129338 bp, Homo sapiens
gaactatgacccagtctctgcttgtgtacctcaaaatgcaaaatgaaaagtaaaattaggttcctcttcaagttattattattttgttggaaactctattagctagaattaccctgtccagtagaaatataatatgagccatatatgtaattttaagtgttccattagccatatatatcttaaaaagtaaaagaaatcaggtgaaatgtttttaaaatatattaatttagactgggaggtggctcatacctgtaatcccagcactctgggaggctaaggaaggtggaccacttgagctcagcagttcgagaccagcctgggcaacatggtgaaaccctatctctaccaaaaatgcagaaaattagccatgtatggtggtgcacaactgtggtcccagctacctgagaggctgaggtgggaggatggcttgagcctgggtggtggaggttatagtgagccaagatcacaccaccacaccccagcctgggcgacagagtgaaaccccatctaaaaaaaaaaaaaatttatatatataatttaactcactatatcaaaaatattatcaatatgtaatcaatgtaaaaaattgacaagatattttgccttctactttttatactaagttttcaaaatctgatgtgtaatttatacttacagcaaatctcactttgaaccagtcacatttcaagtgctccatagagacatgtagcttagtgactgaagtcactatacgacagtgcagaactagaatattactcattgtgaggcaaacttggtctctccaaagttctactcataagttccagtatatgttcctgggagtgaaagagtacaactccatctttttctggggctttagagattatcttatccagcattttcaatattgcagatatagagcataggtctcgaagtgaagtaacttactccaggtcattcattaagttgatggtaaagccaggatgagcaaccagatgttctaatttcctgtgctatgctctttccacaagccaatgctaccttctctcacaaggcagacttcacatattttataacacttgaaaataccattagacttctgttctgttttagttttcctcgtgtgtgcctctcagacctgccctttgcccaacacattttgcatactgcaagtactttataaatggtttttattcaaatgagatttgtgcagtttatataagcaatatgctatacagttattattcaactgttttatacagttatgcaaatatttttgtatgtacatcacgtaaagcactgtgacaggtgatcataaagaaaaaatgaaatttgagaaggctttgaaatgacctacctagccctcattgacatctggtaatcaccgaattatcttctaatgttcttaaactaactgctactgaatatattaaagtctttttctgggaatcagtgttaaacatactggccttcattacccagaatccatccttctggagagttatggcaatcttttctcatgtctttgtctctgaactctctcccatttttcttaatttatcaggaattactgctggtaattctgagacctcattttcaaattccttcagcactctgaaaaggaatgtgtttgggcatgttagggaaatgttctcttacttgcgtctctccaaccaaacctctaacaccagtgatcctcaaagtgtggcccatgacccctgtgggttataagtgataaaattcaagcttttaagccaaaattagtatttttaaaatcttatacctgctaccatgaacttgacagcttccgaatatgtaaagactatcctggtgagctcggtggtgatatttttaaaatgtgactttttttgcactgtataatgaagtatgtctgctgggggtggtggctcatgcctgtaatcccagcacttcgggaggccgaggtgggtggatcacctgtcaggagtttgagaccagcgtgatcaatatggtgaaacctcatctctactaaaaactacaaaaattaggtggacatggtggcacacacctgtaatcccagctactcgggaggctgaggcaggagaatcacttgaacccgggaggcggaggttgcagtgaaccgagattgcaccactgctccagcctggtgacagagcaagactcagtctcaaaaaaaaaaaaaaaaaaaaattcagaaaaatgaaaaaaacaaaacaccacctcatcactaacatttttgttttagaatacatggttattttcgctacaatgttatttatattatcatgtgattagcttgtttttttaataatcagatgatgtctcagttttcatttcttatgtagtaaatatcaataacaaaagccctttgagatcctcagtaagttttaagagtgtaaaggaatcctgagaccaaaagcttcagaacactgcttacaccagtgttctgtccatttcggtttgaaaatgaaagaccttcttgttaagtttttataggaagtaacatatataacacagtagtaaatggcccaggcttggcaatcaaattgacctacatttaaatcctgactttgccatttactagatctgctatattcaacaagttattgaacctttctgtaccatagctccttgtgtatgagatggatataattgtacttcctatattatgggaattaaatggcaaaacttgttaaactattaaacccagaattatcaccattacaaaaatttatactaccttttacaagtaatatggttctaatataacaatgggaggcattctaaagtcttgaaattctctttctgaatcaggaagtcatttctccaaacataataccagctcagttttcctccaaactcatcttaatgttttctcataccagattcctaggcactagcagcattaaatatcacatttttttttctgctgtaatattgaaaagcatgcattgtgcctacatgataggtcaatttttgtatgacatctctgtaataacgtcacatttggaaacagtgctgttgcaaaggctgaatcggaagggttaggctgaatcaaagtgttaatatgagcaggtgagcgaagcaattaccatgtactgtctctaaggatgagtgtgtcagtgatctagtgatgactttgctaaattttaaattgctttttactgcaggtatacacttaatggacccaaccagaaaactctgtcaatgcatacatcaccttgggctgttttgacgtattaagactgtgtaacactgtaacagcaaattctcataatcaccatgtttggacctgtgataatgctaattcctttacttaatgtaattgacaaacaacaggaacttcttcaaatgtatctgtgggagccacatagatacacttggattagtattttattcaggctccctgaggcttattacaatcagatatatttcacttttcgaagcttcatccacctttaagactctaaagccatgattagaattggatatttataaagttatcttcaagtttgctgactcttctgtcatttccattcttctattgcccatctagtatgttatttcagatattgtacctttcagttgtaaaatttccacatggttccttttataatttctgtgtccttgctgagaacttctgcctttccattcattccaagtgtgtttatctttatctcatgaaacataattacaatagctgtttttacatctgataattccaacatctgggttattttgtggttaccatctcttgattgactttttccctgggaatttgtcacatttttccggttcttcctagttaagtaatgttggatactgtgttgcatagactctgggtcctgttaaaattttctgaaaatgtttgattgatgattgattgatcaattgattcaggcaatccactcgattaggctcaggctgcaagttttgtctcatcatttatgagtgataattccaatctgtttcattttcaaagcctttgctatgcttctttggtctgtcctgtgcatgcaagctcaggagtgagcccaggacttgtagaagttcaaactgagaattagaggattcccttttccagctctcttgtcttcaggatttccccaaccctccccccaccctcatactccatggccactggcccacaggagactctttttctggttcctctggccaaaaagcttgatttatctcagtgtgagctgctcaagtcaccgtggttgtgcagctccacaagtggggcccacccttggggcgaagctgttaagacaatagaagaaaagaaacatccctaatataggttgcttttccaagttttgactctctttcatcatctgccttcttccaaatatttaaagactattcttgtcagctctaaaaaagtgttgtgatatttttttaaatgtgatttgtttttctgcattgcataatgaaatgtgtcaacactggaaaatctacaaaactcagtgaacctgtattttccaaatgactcatcgatgatgtcacaaaatcaggccggggtaaaagatctattcaaagaataagataaactaatgagtttgaataaaacagtgtagaaaaagtttattgatggttgtcatcagtaggggacagaatttagtggttttattccaccttggctgaaaccagaagttctcctgcctacttctccaaaatttatcttacatcaatctcccatcacttactctgctctagcctttctcttcttacgctttcctaagtgaccaagtttgttcctacatcaagccatcacacttgctcaactctctgtataaaatctgttttcccactctaaaatgtaaaatctatggccttttctcacttctccactattgtattccaacttgacacagcaggcatgcaacaaatacttgttaggtggccggttggcctatttaactgagaaccaatcactttaaacagtctgggcattctagttcaagcaaaaataaggcacaagtttatttaatggattttataccaaactagcaaatcaaagaactgtaattctgggttttgatataaaaatatataccaacatcttatcatcttacctgtcaagaatgttgcaagatacataattttctcatttgtagcttgaacaattgttaaatatttatcttctttgctgttcattttgcaggatttatgccttgtgttagcttgcttttcttgtgtcagtaaacaaaaaaaaaatttgtcatgactccattacctgtgagttgttttagacttgttttcaagagatgaggtctcaccccgtcgcccaggctggagtgcaaggcacagatcatggctcactgtagcctcaacctcccaggctcaaacaatcctcccagctcggtctcccaagtatctgggactatatgcatgcaccaccatgcctggataattttttaacttttttgtagagacaaggtcttgctatgttcctcaggctagtcttgaactcctgggctcaagcaatcctcctgtctcagcctcccaaagtgctgtgattacaggtgtgagacaccaaacctggccagacttttttgtttgctttgtaaacttgattctgtttaagaggtagtatgcataatatggtagaaataagactgctgtgggttcaaatccacttctctatttactagttgtgagagacacctggatgatttaagttccctttcagtctttgtgcataaaatgagataaaatcattgaaggatgggtcaagcctgtgaactgactactgcagcatgacacacactgtgggctcagaacaatgctattctcttcccatcccctgtagcagcccccagtagtcagagttaatttgggctcttaccatgcttttccttctgttttcttttctctccttacttcagcttcctctcttgctgtgcgccttcactttggtctttaggtaggtgagctgacttatcacagaattcctatgaattgtcaatgtcttcaagttttctgaggtagaattgtgtttaattttctagagaaagatttgagttgcttaaagcttcaagtgtctcctagccaagtaaatcatgttcaaagtgatatttttgttttaaccctattggatttttacagcaacaatggctcagtcttctccaaggacagctaaacacattgaatagttctgctgagtctaacagaagggaaaatttaccttatgcctactcttttaccaaacactaaaaggtattttccctttcaagcatttatttaatatacagtactaataatcctaaaagacatatgtattattcttatgaattatgactatacacagtaaatgaagtattagctaattaattaaacaaccactgtacttccattgttaaagataaccatgtaaaatattgggctttcctgttaatgatatctctgcagaaataccgaataacacttaagaagtttggtaattttcgtatgcatttgtgaaatttacatatatttctcttccttataggtaataaggactggaaaatgagatctcaaggacatgattataattgaaaagagaagtataaacatgactataattcactaatagttcttccacatatcacgatctgttctaatgtcagttaattgggctactttagctctctaggttttattactgagagaatattagcttactagagattatttttacaggttatatttttgctaaatttcacaatatttacaggtcacatttaactgtttatattattagataggagcatataactattttcattctcaggtatttcagattaataaaccctacagtaaaagcatggcttatttccttgaaaattaagtttgaagcctacttaccaatgtttaaaggagcagctcacaatactattggaatgtactttcaaattccaatgaggttgggtcaggaaacattctaagtaaattctaactcttaagccaaaatcaagggacatatacaatacttttttctaaatttacatgacaatttttctcacactgggaaacacattcacctgccttaaatcctttctaaagcaaagtaaaatgttaaagaaaaaaagagtctcattaaattcagaatgaaaacaaaatgcagttgctcaggaaaatgtctttaaagttgcttaaatctattttaaaattaagcattagaggaggaaaagttaagagtcaacattttcttttaaagtgtcatgcctaattttatgtggctgccctgataggaaactgatcactagcaaaaggttaataatgcccttatacagttgcaaatttctatagtatcaaatattcaattatactattttcctttgatcacaaagttaagcttcttgaactttgaggtgagacgaggtaagaggtgaggggaaaatagaaaatactttttgtgaaaaaatatttcttttactagatattggtacttttccagagatttttgcttatgggttaagaatgaaaacacaacactaggccataaatttcatcccttctgtttgtcaagtaactcaaaatttgtaactgtttcccatcaataaatcataaatgatatttcctttcagctttacagaaatgttttaaggccataacagaactttaatgtcttctgaaaagaggtaagtattgtcaaaatgcacaaagagtataatttaaatttaaaaactcaacttggagaatgaaaaggaacagactgtttgtatagagtttgccaaaccaatttagaaaacaaaatggttttagaacattgcgactattttgggtggtattcctaaaaattctccctagatatgccaacaatcatcttaaaaactcagaactaatgtacagagttgtataaagtgagaataaaattgtatagagggttctgagtgcatctcgctggttgaaagaatgaaggaaaatcccaatgccactgttagtcagcagtcttcaaatcttaccttcccagtgaggcctgttctggactacaccattcaacactgaaatctctccacccagcaatcctgagctcccttacctttcatttctgctatagcacgcattaccttacatatagtatgttgactattttcccttgctagaatgtaagctccatgaaggcaaggtcctgctgttcacccacttgtatcccaagcatctagaacagtgtctgacacatatctggtgctcagtaactattgaataacttgcaatttagagtttattgcatcatgtcatttaaagatgccatatttcattttgcttcattcttaactcccttttgtagctcaagaaacccttccctgatctttccaaagcactgttttagtcaggatataacttacactgtgataaaaaattgtcccaaagtatcagtctaaatggtttatttcttatttatgctaatatctaacaagtttagcgtggcagaaggaacaatttgagggagttctgctccagtatcactcaagacccaggctgacaaagctgcaccatctagaacatgcaaaatccttaatcacagcagtaggggaagagagaaactggatggtaaatttttttcattgcctttacagaaagtggagtgtcacactactttctgtattacattagaataaactagttacataggcctcattcaactgcaaggtgatggaaattttggggagcataatgtttgataaccattatcacatgcacctcactttccacagcatgtatcacaatttataattgttaatgtaaattctgtttcctctactggagtgtaaactcttcaagggcagggatagagggtgtgttttgatcactaatgtattccaaacccatatatacagcagggacttggtatttgttgaataaaaagtttaaaaccgaatagtcaaaataattaacctttttaattttttaaaggaaaaatactctccataggaaggcatttctattttttgtccatcagtagccaaatggaacttgatataaacacttccagtatgccaactttggtttaatgcacaactttgaaaataactcattaaaacacacatcaagatgctactaacaaattcattaatatccaagattcattactgtatgtcaaaggtcatccaggattaacattttcattacaatgaactgtgaaattccaatgaaaaatgtttgcctgaattaaattatttaatctctcaaattggaagtctagcactcttgaaaatcaaattcacacacacacagacacacacacacacacttacaaactgcacattaggacatgagggcaatttaatggaaaaagaaaatagaaactgaaagggcatttgtaaaatgtaggatatcatttggacaactggatagagtaggcagaaaatcctaaaggtgtacataaaaaaatagccagtaaatgataggctacagaaaaccacactgaaacatttgatgaatttcactgcagtaaacagacttggcaaactgaaacactagaaccatgactacaagcctcacttcattccacacaaataaaatctctaaccattataagcacagatgagaatcctcatgcaacagaggaaatataaattatttttaattttaaaaaataaaaaatataaattcttgttaaacacttgatttaaaaatatgcagctttatttttaaatgtagttatgctcaaagatggcagtttacttatatgtaaaaatgttttaaaaatatcaatatattggtttataagttctatactgccctcagctaaatatttttcaccaaaattctcaaataactatcaaaaagagttgcatgtttttataagcccactataattactaaacgcggtaattttcagagctaaaggtgaatcattaatgaaatattttttgatgtgataaaagtcacatgagcatttgaatttaaagacaactgataagccaacagcagcctttttttggcaggtgttaaattaatttgctctaaattgagcaactgtttgggaactacaaaaactgaaaagttcaaactataaggaagtagaaaggtgatgaagtttactaatacagtgtttcacacattctatttaacacaattccaaatgcaaatgtttaagatgatttttgaagagaaacatctacaatgttaagcttgtctatgctaaacaaatgtaactttaatttacatgtatcatcctaatgtcaacaatatttagacattcatgattaagccactgaattcgaaaggattctcaataactacatgtaatctgcatctgtggcattagaaagtaatcaaatcactgtccgttttctgatgcaatggaacatcctacaaattcatgacagatatactaagctaaaaagctttgagatcaggtacagtataaatttcatttttaaagaatatacatggatatacagaagaaaacatgattgtatagtcactaacatattaacgatggctatgtctccaggtgataggattatgagtgattattttattgttgttgtgatggggaagtagtctcaaaatacctagcttaacaaccagagtactaccaccaaagcaaactattttgtcctttcctgtcttcacattacaaactttttaaagctaccaaccaatatgaatttgtctgactggctacccacattctgatatacatattagaaggaagatcttttggaagatggaaaaacagcaagattatggtcataaaagaataatatgctctcaaaaataagcaacaatcattaggctttctatagccacatacaattaattctataagaaagttggctccaacatttcatctttaaaagactttttccattatcctgtttcctggttttcaggtactgtccttacaacagtttggactgaatattcttgtttccattcacaaacatttctttctgaactagcaacagcactaatcaatagctacacttaagccatttaagactaagctttagatgtgtgtctaattatctggcaaaaataaaagaaccaaagagtttcatgttagcagcaaattaactagatttaagggtcttgatttttttcataagcctttggaagcctgcatattaaacactggtgagttttaaattctcaatggaaatggtgatggcatttactgaaccaagccagctcatattacaacgtacaaaggacatgatataaaaacaaaactagcacatttctatttttcaaacatcaccaaaatgtcttcttataaattagaatacttttagactccagtatagttttcaaccatacgtatacccaagataccgaaaaataaaatgtgtgtacacatacacttcatattttacattattgcacattttttcatttactttttaaaaaattacatggagaaaatgtaaacttgaaataataagtcccactgtaacattgtctactttatttttttaacacttgtacaaactacactttcttattaccttactatgctttgttgaaaggatatgctttagtcttcaagcttttaagaatattagaaacaacatgattaaattcaagtacaaaaagtcctttagactattccgaaatatcaatttttatatggcacaagtcatgatgagtaaatgaagctttccatatgctgatggcagagtacagaataatagacaaaagccacaaaattgaaatctaaagtatcaaatccattctggggaattatcttcaaacatctgtcataataaaaatatgcacaattttctaagaatcttggactttttcaggactagaacgctatttaatgtgcttatacaatttatgaagtgatgactaaagccctaaaaataagtgtttttccttaattaaacatgagtagacagatactctactctcaggccatgtttttttttttttttttttttaaacagtaggctttgaaggacagcaggaaaaaaaaaaactgaaaactttgtattcacatttggctgcccattaattaaaacttcaatggacttaagcaatttgaattataaactctcatttaataaaacacccacacaatgacaagaatgagactttaatcagttttaagtggagtttataacactaagagataaagggttgttaacaaacacaataacaaatggacatctgattgggatgaggcattatcctgtacacatcatattggtatttttgtgtatcctcagtgcatagcatttacacacagagccactgctgcacagcacaagagtatctgaagaggctgaatcagagtaaggctgtttaacagactgaaattttttagtatatatattctatatgaaaacaggttgaacttttgaactggcaggtagaaggcaactctgccaaatactacagttaaagcccccactttagtgcacagttccaccccttccatctgcatgcatgacacattaacagtatttaaaggtaaacgaggcactttgtggcaaccacagccatcgttatgaacatattgcacaaaatttctagaactaaacattaaacttgtaccctacttttattttttaaagctgaaacatttgatgctgccggtaaactccacttaagtttataacctgtgccacagcaaagaatggtgatgctatttattcaactacccttttaaaagtatggcaaacatgttcaagaggagctacaaaggacttgggatggtacagggcccaactgtaagctttcttaaaagtgatgccttcaagtaacttcagacatgtaagctgctgcacatccaaaaagtctaagaaaatattccagaaactcagagattacctacagaatgcatttcaggctaattatgaatactgccataaataaagttttaattaggactcgaaaacctttcagtcatagcaattcttgtcaaattctatggggatggtaactgaaataaagtaaggagagtatgtataatatatatttatatatataatatatataatgccatttttccatttccaatgactacaccataaaatgtaagcaaggcttctcaaaaacattgaaacattcaaaatcaaaaccctcattcagaccttcacattccaaaggaaaaataataacagtgcaaaagcccattataatgtcattatttatgacctggccctccatgttacatattggaacaataaagttacgttttaatatgcggtgcccgaaattgtaacaaagaacaatatttataactatcttcaaaacatgaagttgattttcattttaggtaacaattttcagcttttatgaaagacaaggtggcatataaatttcaatggtgaggtgttagaatagttgtctctaactttaccaatttaacttatgagcaatcaatcaatactctatatatcaatgtttaaatataaatgtgtaaatcctaagagctttgttaaaaatttaaaaattgttgaatgaaactgacaaggtatggaaaacgtgtcaacattatttactaagaatattttagatgaagttctgcctaatctatttgccatcaaactctataaatgctgctctagtaggtcctattcaatctgtatttgtaaattaactaggtcagaccacagctagtgaacaatttcagcaccaataagttattgaaaatggaattttataccattaagaaacaaaatggctggatattcaaatgtcaaggtgaaggtataatttgaagacaccaaatttctggaaaaaaaaacctttttaataatatcttcacattagctttacaatagtagttgtactccgcttaaaatcgtatgcagtctgggcatatcaaatatatgatgattttttttaagaagtgaaattgaagccctagtcccaactcgggggagcactatgaagaaatgattcaacactgcacatttaaaaaaaaaaaaaaaaaaaaaaaaaaaaaccctattctttcaatagcaaatcaataaagcacatgtaggacaatttctactgaaaaatcaaatgtcttttttttgtgtgcagcattgaaagtttactgcaactctaatttcctttttaacacaaatgtcctttttaatataaacattatatgtattcagtattcaagtaaaattccctaacagttaatgacatttaaaaaatgtgcaaaactgcaaaattcattgtaatagaatgtgtaaggtcaaaagggtggaacggctgacagctattgaataagtgcatcataaatcttcaaagaaaaaaaacgcttactgtagaatctcaaattgaaaatttctgtgcagcattacaaaatattttatatttaatgagaaaaaagaagcttgcaggcagcacatgaagcatccacagcaggtattatgattgaaaactagtaaaataagtgtaagttgttgactgatgtaggtactaacagcatctgaattttagcactggccttgattacacaggagatggagaagtcgttacaattgagaaaacatatttaataaatcattgtcaatttttataatgtttcaagcccattctttgttgatagcctccacatttatatggttaagtcattgttgctgtgtttcttacctatgacattatttttatatcccttcatttgtggatcttaagatgttgcagaaggttcattcctgtaccccaatacagattcacttcctttagctgccttttctagcaccaatatgctttaaaaaaaaatgcgcaaacaacaagcagtgacagcggccaattcctcgaatgtccagattaataactgtagcatgctaaagaaaggtgtgtgtaaatagctggagatggtatatggtccagagtccagcataaaattatttcctttctgagcattccctccattcccctaacccgaatacatgcattagaatgtagcaaaacccttcggaaacctctcttagccaactgcaaacttatctgttgccacaagtgcaaaggggtaggatgtgaaccagtatatcacaaagctctttagccacttcagttggtgacagaacacaaaaggaaaaaattcctacgtatacacatcagtctgtctccactttttataaaactggaataaaacgggaaagtgccatctttattaatcctaattgaattttaaatgtccttttgacacaaaaaggtatatacatgacacagctacacaaccttttttcaactggacaacaagtgtcaaaaccctgtggatgtatagggtaaaacaagattggtcaggaaaagagaattgttcctataactggtaatctgacacaatgtcctattgccattaaaaaaaaaaaggtccattttcagtttattcaagtttattttcatggtgttttatccctcttgataaaaaaaaattcagacttttgtaatttgtgtatgctgatcttcatcaaaaggttcattctctggatcagagtcagtggtgtcagaatatctataatgatcaggttcattgtcactaacatctggtgttacagaagttgaactgctagcctctggatttgacggctcctctactgtttttgtgaagtacagcttcacctagagaaagaaaatttaaaatgaaaacccacaaatatgactcatcttaaactatttagtgaaatatatttttaacagattttttattccattttgcagatgaacatattaatttttaagcactgtaacaaacatgatctttaagaggccttttaaatgaccctcttcttaagatgttcaacattttctttcttgctaggtactaaacagataaactatcaggatgttaatacaatttatttatttttatttctggagacaagagtcttgctctgttgccaagctggagtgcagtggcatgatcttggctcactgcaacctctgcctcccgggttcaagcaattctcgtgccttagcctcccaaacagctagggctacaggtgtacaccaccatgcccagataattttttgtattttagtagaaatggggttcatgatgttgcccaggctgatctcaaactcctgagctcaggcaatctgcctgcctcagcctcccaaagtgctgggattacaagtgtgagccaccacgcccaacctcaattttattttttaaggaatataagtggcaaatattaactaaataattatacaaaataaatgcagattgaaagtcatcaatagtttacataatatagcatttgaattacaaaattcaattcacaaacagctgagttcaaaaagaatgtttctcttactacctatgtgaaaaatcaatgtatttctttgtgtgtgtgtgtgtgtgtgtgtgtgtttttgagacagggtcttgctctgtcacccagactagagtgcagtggcatcttcacagctcactgcaggctcaaactcccaggatcaacctcagcctcccaagtagctaggactacaggtgcatgccaccacacccagctagcttttatattttttgtagagatgggatttcaccatgttgcccaggctggtctcaaactccttagttcaaggtgggaggcccaccttggcctcccaaagtgttgcgattttaggcgtgaaccactgtgcccggcttcaatgtagtttttgatataaacaacactacacaaacacaaactactgatcaacattgatatttgggatttattagccctaaaaactttacctaaagggaggaaggagagggacattaacataatacagtggtctataacagagagtcaagtgcctttacatgcctagtgaaaataactgtcaaaacaaccttacatgttaggtatttccatttccaaggggaggtagctaaggcccagaaaggttagggaacttgttaaaggctacatatctattaaaagtaggtagtggatgtgagatttaaatcagaaatgacttcaaatcccttcttcattatattatattgacagcccctccctcccctattatccaagagtcattatcaattcttctcttacaaccaacatccactgcatcagtaaactctttaagttaatctgacagcttcttgttacccttcactgccactattctaagcagtgaggggcaacaagaagcaaacatcttctctcatctttactaaactattcaagtacctcttaactgatctctcagcttcctttattaccccttctccctactttcctcactcatctgtattttgaaagcatgaacacagggaatattaaacacaaaattcagattacatccttcctatgctgaacacacactagtgtctttacacttggactggttttcttgtccactctgtttcagtcaaaatgacttatccactcttcagatataccaagctcattctcttgtctaagggcttttgcatctgtactcttaactcttttcccagatatttgtataactcacttatatgatttaggcctctgcttaaatgttatctgcttggttgggccttctctaatcatctttgctaaaaaacaaaaaacatacaaaccaagattactttctatcctgtctattttttatagcacttactactatatgacattgtatttgtttactaataatggagtttttatttgtaatcacaaatataaaacatcttgcaatattaaaatagaaaacaataaaactaaagggaaaaagacattttaaaagttaatggctgagcaaaatgcagatttagagaaaagaaaggaaacctgtggattctaaagagaatgtctagcccggaggacatgatgttaagtaaaataagtcaggtacagaaagataaataccgtatgttctcactcatatatggaagctaaaaaagttgagctcataagagtgtggttattagaggccgggaaagggagtgggaggggaggatagggagatgttggttaaaagataaaaaattacacacaggaggaataaattatagtgttctatagaactgtaactagtcaacaataatttactgtatattttcaaatagctagaagacagaattttgaatgttcctaacacaaagaaatgacaaatgtttgaggtgatccatatgctaattatcctgatttgatcatcacacactgcatacatgaaaatatcactctgtatcccataaatatgtacaattattatatattaaaaatttttttaaagggaaacttctgaacacttaaaaaaaatttaagggctaaagacatttaatattagatctattttcacttaaaacgtgcaggggcccaagtattactattactaccaatatacatacatacatacatacatatatgtatgtatattggtagtaatagtgtgtgtgtgtgtgtgtgtgtgtgtgtgtgtgtgtatatattttttttttttttttttttttaagacagagtcttgctctgttgcccaggctgaagtgcacgtgcactggtgtgatctcggctcactgcaacctccatctcacaggctcaagcaattcttgtgcctcagcctcccaagtagctgggattacaggtgtgcgacaccatgcccagctaatttttgtatttgtagtgcagatagggtttcgccatattggccggctggtcttaaactcctgggcctcaagtgatccgcctgccttagcctcccaaagtgctgggattacaggtgaagtattactagcaatattcttaatactcagacgctacagttagatttattacatgttataaaaattgaatgaaaaattaagagagagtaaaaaagagaaagaaacgagtgtggtgaatgaacaggggaaaatcaggtagaataagaaataggaagggggaagaaaaaaatggtaaacaaccacttgggaatgtttacaaatcagatttttttaatctgaagaattcttgtctataagtagatatatatacctatgtagaaatacatatatcacacataggcaaaaatgaaacaaaccaaataattctaagatacaatataaggaaataggatttttaaaaaaagaataacgggaggacaatcaaaggacttcagagaatatgagattgaagctaaggctggaaatatgaagatagctatggaaggtcaggggaaaaggctgagatgaaaaggtacagggagaaggaaaataactggaaagactagaagaggcagaagcttagcattttgaagaactgaagaaagaccagtatgactgaatctcaagaaacaaggagagaaggtgactagtgctgatgtaggaggtagccctgtgctaaattatgctgggccttgtaggtcatggtaaaaaaaaaaacacaaggtccttataaagtgtaaacagaagtgacacaatcaagtctatttttaagatcactctgagggattgagaataaattggaaggcagacaggagtggaagcagtaaaaacattccatatgaatcattcccaaatgactgagttcccatctatttctttcctctcccattcctacttcatatcccagtcatttagccccctcccgcacctttgccccagatttcagcaaacaacgaagaattaggaaaaggaaaaatgcagcttttttgacgctgtgtacattgggtattttattagaaactttcatgttactgctacgtaaacactgcttcgaaataatacataagttaaaaacttgtcaagcaagttcttcatcagctgtactcctagaattaaacacacatcacatacatacaagtcaacaacccccacaaaatgtttaatttaactgaccttaaaatttggagaaaagtatcggttggctttgtctttatttgctttgtcaagatcattttttgttaaagtaagtactagatattccttgtcattatctgcacgctctatactgcaaatgctatcgatttcttgatcacatagacttccattttctactttttctgaggtttcctctggtcctggtatgaagaatgtatttacccaaaagtgaaacattttgtcctaaaaaaaaaaaaaaagaaaagaaaaagaaatgaaatgacatatttaattaatgatgttttatttttttaaaaaagaaaatctgtcacctatgttaaacatttgcaaaaagtcaacaaaataaactatcatttgatattctgaataaaggtaaacacaaagactattataaggcaatctgagttatctgttgcattttcattcacatgatttttcttcactcaaattctcaaattttaaaccaaaaatacaatctcacaagatctaagataaactacttttgccttaaaattttaagtaaaaaaacctcttttctcatctaatactagctttaaatacgtttttagtttacgtgtacatacatataaacaaaattcagatatggatttaattttttctacatttcaaatgagctacctattccaagatttactttaacaaaagttcttggacggtgagtgcaacttccctgatgacgcatggcaaatacatgtttacttctacagcaatacaaacatgagaagctccagtttcttacatgacaatataatgcttgaatactttcagaataaatatgagggggtaggaaagagtactactgatttcttttgatgttataaaatgcttgttcttaaaaaaaatcacttcttactaataagataataccttcttaataaaaaaacacaacagaagttcatcactttaaacctctattgaccaacaaagaaatctggcctgtataaatcatttggcaattaatgatatacagccttgtgacatcttatctggtacctggtaccttaaaatgccatttaaatcttttattctaatttatcttaaagttttttatcccccagaaaataagatccttaaggatgttacgtcttaaatgtcattgcatcttttaacagtacctggcaaagtaatcttgtatacaaggtctttaaaattttttttttgcttatttcaattattttagccagtaattgtattttacttagaagaaaataagccaataatatttaaataacaaaaaggtgaattctatatatatatgggttatactaaaattttttgtgttttaatcatagcatattcttaaataaggcagggaaaatcaataaaatggaaatttatgtagtcaaggataaacaaataaatcataaatatttaatctaaccttcaattttgcatgtgttaaagtacagatgaagggaaataagaattaggaaattcctaaaggtatgcagagatgatgatgtagatgcctatttttgaaagctaaataaaacttactagttatcttaattttaaaacagttgctaatacttcctggattatcaaaaaataatttttctaagttattgagatatatttaacttttatttgtacagacgataggaaatgggtttctggctaaaaaaaaaaaagttcagcatattttgatttttttttccagctacttggattctggataaaggaaaattatatctctactgatacatcaaagcagcatttaaaattttgcagtaaatgaaacttcctcttattttctttcaaaagaaaagctaaaaatcagaaaaagtaaataaatcctatcattgagaatgtttaaagattggcaatatgctatctagtatgtttaacaaggcagcaacactacaaagttagtccttttcttcattactatctaaaaatgttgcaccttagtctcactttaaatattcacatttaatattttaaatgaagatagttgttgttttttttttctttttttttgagatggagtttcactcttgttgcccaggctggagtacaatggtgcattcttggcttactgcaacctccgcctctcgggttcagcaattatcctgcctcaagcctcctgagtagctgggaaaacaggcgcctgccaccacacccggctaatttttttgtatttttagtagagatggggtttaaccatgttggccaggctggtctcgaactcctgacctcagctgatctgcccacctcagcctcccaaagtgctggaattacaggcgtgagccaccgcacagggcggatagttggttttaaaataataagacgttgccttctctaaatacagatcaatcaaattcaaacttcattaactttctaaacctgcacatttaaataccatgttttcattctttattacttcctcttcatactgatttctctcctagttaaaaaattaatcagtaaatccacagaagctaaatagaaaataatcaagtcttaagaaacgttaaggccaggcatgatggcgcacacctgtaattccaactctttgggatgccaaagcgtgaggactgcttgtgcccaggagtttgagaccagcctgggcaacatagtgagaccctgtccctacaaaaataaaaataaaaaaaattagctgggtgtggtggcacatgcttgtagtcttagctactcagcctgggcaatagaacaagaccctgtctctaacaaaaaggaaaaaaaaaaaaaaggaaagaaaaagaaacataagccaaaatggagaaaaagtggtttgtgtcactacataagaccacagaacagatctcatttctacctatagaccaaaatttttaaaatattggtcccatgctaatttcttctcagttaaccatccttgttaagaaaaattcctctcatgttacaatgccataaggccttttccttcaaacaggattatttacccttataatgtctcaccaatgccagagtaagcaaaacacctgcagatctaatagaaaacaaattatagttccttacatgtcataaaataaaatatagcttttaatctgtccttattttggatatttctcccaatgaaagtaaagtacaaaccttttttagcatcttgttctgtttgtggaagaactctactttgatatcaccacacacaggtaacggctgagggaactcaaagtacatgaacttgtcttcccgtcgtgtgggtcctgaattggaggaatatatcttcacctttagctggcagaccacaaactgaggatctgcatggttaaatacataccagtattatttcacaggaaatgcctttaactgtcaaactgtcaaaaacgattttaatgattaatatcagcaatatacacgaaatatggattctgtatctgcaatcttgatctcaagcaaatcaactgaaataaatgaaataaaaatataaacaatgtaagattttctccagtttgaaccttcaaaataaggtcctattacttatataaaagtcaattcctatttcatgaatagtaagtcccaaaattagacttctagtggcagagtaacttcaaaactttaacattaaaatcatactaaaaatcctaatacaaataaaaactttaagcattaaaaacgatgaaataattatctggtacatttgtgaactacatcaaaagtaacttttaagacagatatcaacagggagtagtcacgaaaaatttttaaatgtaaagaagacagatatttgctatagtattcttaagtctctagcatgcggcaaagatcacaaaatacaaatcactacatgttcacaagagaaagaggataaaacctataacaatgttataaaaaatttcaaaaacacaagtctaaatatttattaaaaaattaaccatcattcattttcctatagctcacattttaaaggtatataatgccaccatcataacaggaaacaagagatttgaaatttctgtaaagaaatgtaacagatttcaagtaaaaactgcagcacaaccttcctttcctccaaaacacctcattttcattaacaagtattctggctttggctcatgtctgttttaaataactggtaaaaaataaagtaactggtaaaatataacttctcaaaattcatcatgcttttacactagcagttgaaccaaatggtgggaaagtgtgttaagggaaggattgtatgttttattttttaaatctactcataaattcatttatagctaatgaccttaatgacagaaattaaagactgatgaatgttatgatcccaggacttcaaaaactgaaagttacctaaataatttgacaaagtataattcatttgtcatacgctgaggaattagaaaacaaaagtccattacaaagaaatttattaaccttaggaggttaagaagtgccatttgaagaaaacatgccaagataatagagaaacaggaacacaaagttacataaagtgtatgagaaatattatacatatttaaatatattttgtatttatattacgtatatatatatatatatataaaacaaaaaattctcagcaccaaaaggtgtcattattctaaaagataaacaaaagtcttacatttttatcaatgtgactgagaacaaggcaaagctaaaccaagttaaatgaaatttccagtttagtaaacacctactactatttctatgtaatatctaaagcagtatcagccatcacataattaatatgtttgataaaagcatgcaggctactccaacatggtcttctaagacacttattattcaaaaaagctaccacaaacaggataaatattacaccaacaatctatcaataaatttcacttccttgactcaaagttcaaagtgcaatgagccatttcataagactttatgtgatactgaaatttcactgggaaatctaacttcaagaagcaaataaacaaagtaggattccaaagctgtgataaaattaaccagaataaaactgaaaaactgccttgtaatctttttgatttaaactccattaattcagaatctgataatcctgattttaggactttaaaaagcaaattaatagtatttccaggtttcaattaaactacatctaaaatgtgcatcttcaaatattatagtattatattaaaaatgtataagtagtaaagatttcctcaatcactaaagaaaataatcttctctgcaatatgaatatcatgtttcagatagataagacctaactaagcagaagtccaatattagtatggttctgtggacttctacaatatatatccttggatatatatgactatgttccaaaaaataaataacaagatccagacctagtgatatagtttggatatctttccctcccaaatctcaggttgaattgtaatccccagtgctagaggtggggcctggtggaagaagcttgaatcatgggggcagatcccacatgaatggcttgggccatcctcttggtggtaagtgagctggcatttaaaagtgggtggcaccttctccccaccactccttctctttcttgctcccattctcaccatgctccccttttgccttcagccatgattggaggcttcctgaggcctccccagaagcagatgctgctatgctttctgtacagcgtgcagaaccatgagccaattaaagaagaattcataaagaaaacaggttaaacctgtttaatactcagtctcaggtatttctttaaagcaatgcaaaaacagactaatacacctagtaaatgaaaatcagaatgtaaagaatggaatgataaatagtggagacttgaaacggtgagtagaagatgagaaattacttaatgggtacaatgtatattattcagatgatggacaacctaaaagccctgacttgaaactatacactctatgcatgtaacaaaattacacttgtgtccctaaatctatacaagcaaaacaatttttttaagtcagaattaaatttccttggatatatacatattgttatagtcttgaatgaaaaccacattgatcatcttttagtaacatttttaaccctgttaaatgtctagaatatagtagctttttccatctcttagaaatattaagacaaaaatcaagaaaaagctgccaatccctacagaagatgctgtatttttcagcactatctgttctctacattgattcctcttcttcttcctaaacccaagttgccattcttatctcagtcctcaccctctccttttcttcctttcctccaagacttcccatgcccaaacgccacaccattatttatatgaaaggcttaactactctccctttcctgatgatgcccaaaatatcgatatatctcctacctagattcgaacccatactcccaagtacccactgaatattgtcatgtgagaagctcacttttaccggatttaaaacacgtttaaaaccaaaatatcaacattaatgtctccaagtctcagattcacttttctttctttctgagactatttcacctgactgggctcaaaacttttacaaaatctttggctataaatggcaaataaaaaattaatgaaatcccatttgattgtcttagcatacctgcattaaggcaagttttattactggtttcttttccactattttttcctcttgcgattacaactttgcatacaactgtccttaaaacatggtttagtcctcaagtattatcatgacatctcagtatttatgaaatcaagtctgttatccccattcaagatcctctaacagtcactcacacgttccatacctattctctgacactacattcttgtccagctttttccttctgctgcacttccactcaagctatttcccattgcctgtaatacttctttcagtagtttttaatttatttacttattttttttttaagacggagcctcactcttaccgccctggctggagtgcaatgacgcaatctcggctcactgcaacctccaccttcggcttcaagcaattctcctgcctcagcctcccaagtagctgggactacaggcacgcatcaccatgcctggctaatttttgtatttttagtagagacagggtttcaccatgtcggccagcctgatctcaaactcctgacctcaggtgatccatccaccttgacctcccaaagtgctgggattacaggcgtgaaccactgcgtctaccactgcgtctggccacttctttcagttttaatgccagtctaaactgtatgttttcttcaatgttcaataaagaactggtgaacttcctttaagaaactgtctgacaaccttcaaaagcttttctgaatgtagcatttataatttatatacacaacttcccatttattttattttatatttatttatttatttctaagacaaagtcttgctccgatgtccaggctgcagtgcagtggcatgatctcggctaactgcaacctctgcctcctggattcaagcgattctcctgcctcagcctcccaagaagctgggactacaggtgtgtgccactatgcccagctaatttttgtgtttttagtagagatggggtttcaccttgttgtccaggctggtctcgaactcctgagatcaagcgatccgcctgcctcagcctcccaaagtgctggggttacacgtgtgagcctcgtgcctagccccacaacctcccacttaattacatatagctcatattttattaaaactttactacagtattaaatcatagtacataagaggaaactagaaaatgaggaaagattactaaagtgaatgttttctttcccttaatatctgcatgatactttatacctttctcttggctcttacactgatatcaatactataggaagagcatgagtttttcttcctttttccttctctatgaatctgttacattcatctgtcagtcacttccaacagctcagtaccttgcattcagcagttttaaaaattgtactgagatgaaaagagcatcaatgagactctttagaagactttaacatgctatactaataaatctgtggtctttgataaagttatctgtctctaagaatacagaaaagatctgatgaggatgatcacacctatctgacaacaacatcagagaagtagaataggatcaggatgactgaggtagacttatagagattagggtaaaagggagaaataaatagaggcagacatcagtgacataatctgtatttagtacttatccaggaagtctcagatttcaaagtctcttcattttattgacaagcaaactcaaagagaggtagatgatatgctcagggttacgcaatagattaatgacagagataggactagaatctggatctaaatccaggttttctctaacactccacatactttgattcctattctttactcatcatacttcagcttgctgccacgtcttatcacttcttcctttccttttcattgctttgtcaccattactgtcaatacctagtcttcctaagatattaaggaattgatccctgccctaagagcagcaaattgctgaactcctctggtggacctctgctggacctcatgctggacctctgatgggacaggttcttccatcatctagtcagaattgggctgtatttggtggttataacacagaatatttctttcataaatataatttggcttcgactacattaaaacccattgcttttggcttctttagcccaatgagttgaacaacaaagctaattaatttgttcaaatgcttcagaaatatagtctcctgcataaatttcaaatgtggtaaatttctttctaaatttttatgtaaacttctagatatggttaagaaaactgttccaatacatggaaggatgagaatttcaagcacttactgcaagttccgccactgaacattggaatagtttcaaacatcatcttgtgaaacaacagtgccactggtctataatccagatgattctttaacaggtagctataataatacacatagcgcctctgactgggaatagttactccctggtggacagaaaaaaaagagaagccaaattgaaaaaaaatgttccattatagttatttcactaaattgctatggtaactgggtcgtagccatttaagaacatatatacattagaaatttgaccttaaatgattaatacttaaatccagctcaataataaataagagcaatatcaatacaaaggatatcagaataactctcctcccttaaaacaattatcataacaacccatttattcaaaggtcacaacagcgctctgacccatgaaccccataggcaaaggccactgcatatccagaataagtgtcaaaggcctctgccctacagctatgctctatacacctagggctccccacaaggatttatggactccttaaacacacagctcctcacaaacttgattacctactttccaggggaaagagtatcagaatcagcaaactagacagaggcatattgcctttaaggcagaaacagcagtagcaaaaagtgatgctggcattagggcccaacaaaaacaggactatgcagttgatgtaaatgtgtgaaacaatcttctaacacaggtaaagctatccttgtactacatgcatctctttgttgaagaaaccagggaaaaatgaagtgttttagaaaatgtaagtattacaaatgattaaaatgtatctagttctcaagagtttattaaacaataaaacataaataaaattttgtaatacatgtggcacttaataggggaagctgagttatctaaagagaaaaatctaatatgtacaacaatgcattcactaacgaagacgaataaatgaggtatttaagggttttttttattagacatgtgacttaagaaaaatccaacctaaaaatgtaagacaaacaataagcaacattaagaagtttaacggtaaaagtaacttacagaacactgtaccttaaatgaaagtatactcaagaggaaaaagaatttgcaattatttctcttttaagttactactggcatctaaatctccccaatgtcttaaaaattgtagacacaaccttcttctccctaatgaaaaatataaaacatatttatgtgaatttaaaaacaggccaggtgcagtggctcacaacctgtaatcccagcactctgggaggccgaggtgggctgatcacttgaggtcaggagttggagaccagcctggccaacatggtgaaaccccgtctctaccaaaaatacaaaaaattagctgggcgtggtgatgtgtacctgcagtcccagctacttgggaggctgaggcaggacaatcacttgagcctgggagacggaggttgcaatgagctgagatcgtgccactgcactccaacctggaccacagagaagactgtctcaaaaaacaaacaaaaaaccaggtatgctgaatagcaagtatgtaggtatccactgtagtactcctaatattttttcaaagatgagcatgattttattatagacaatttaaaaatatgtgtatgtgtgtataaatgtcaaaaaaaatcggtataaaccatttcaaatcatgacaagtgatttaagatttttagccacagtataaagaccaaaattttataaataaaagacttgtatttgaatgctgacagtcaaaatacaaactctgatgtgttttcgaaggaaaatgaggacaataatatgtacccttccttaacagggctctcatgaggatcaaacaccagatgcagttacacaaaagcatgctaaaactacaaaatggtacacggttttagcaattctgtacctgtattcaaggtgcagttttggaatagctggaattttatttctatataattttcttttttcttttttttttttttttttttgagacggagtttcgctctgtcgcccaggctggagtgcagtggtgcgatctcggctcactgcaagctctgcctcccgggttcacgccattctcctgcctcagcctcccgtgtagctgggactacaggcgcgcaccaccatgcccggctaatttttgtatttttagtagagacggggtttcaccgtgttagccaggatggtctcgatctcctgacctcgtgatccgcccgtctcggcctcccaaagtgctgggattacaggcgtgagccactgcgcccggcctaattttcttaacaaaacagtaaaaggtaaggtaaagtagtagtactttgaagagcagtactactactcttcatactcttcattaaaacattaaaaattattaaagttaaaaaatgtaaacttacaatgattttattacgtcacatttaatgtaatttcagcaaacaactgtcattcatgtttagcaagataaatacagaattgctaagcagaaaggaaatatcacatggaagatgagtgggaggtgtacttttttgaaccatgtgaattttttaaccatatgcatttattatctagtcaaaatatgcaataagatttaaaaaaattaagtcaatgcgagtctacgagtagaccacattgtcaacattatttgttggggtttagtggatgacatttttctctttatctccatttttggcataagtttgtgtgcaataataaaaagatttcaaagctttaggttttttcaagtagcaagtgattagtagtgtacctataatgtaggtgattatacattctgttaatccttacccaaaaaaggataggcaacataaaaaatatataaatctactagttgtcaacattgggtgaataatctatgtatgaataccagttgaaacaaaattactgacaattcaaagaaaaacatggaaaagtacattttaaaatttaatcaattagtttaccatcaatattacagtctattttcttaactttgcaattcttatctacctgctgccttgtcagcacccaaaattcaacacttctagattaacaaatattaaaaagttgggaggctcacatgtatctgtttcagagtctccaatgtgacctcctcattctagtcctatctctctgagccatgatgcacactcactaaaattgaattaacacctgcaatataggatttccaatgagtggaaagtccacactaaaattttagtcatctttaaaagcttatacatatgaataaaaggctgtaaagctcttgcagattaaaaaatactctgttttcaaatcttttttttttttttttttttttgagatggagtctcgctctgtcacccagtctggagtgcagtggtgcgatctcagctcaccgcaaccttgcctcccgggttcaagcaattctcctgcctcagcctcccgagtagctagcactgtagggatggccactgcgcctggctaacttttgtattttcagtagggaagggtgagtcagcatgttggccaggctgtcttgaactcctgacctcaagtgatccactccccttggtctcccaaagttaagggattacaggcctgagccactgtgcctggcctaaaatttttcatttttcatgtaaattaaagctaataagggccagtttttattctctaaccaagaccttttaagttaaattgatctttaactacacacacacacccctgcccaagggtacagttctactttctactagtagtaactctccttttccactttaattttgaggaaaattatttacacagctgacccttgaacacaggtttgaaatgtgtgggtccacttacatatatggattttttttcaataaaatttttcagagatttcaacaatttgaaaaaacctgcagatgaaacacatagactagaaatatcaaaaagttaagaaaaagttaggtttatgtcatgactacataaaatatatgtagattagtctgttttatcatttactgccataaaatatacacaaacctattataaaaagttaaaattcatcaaaacatatgcacacaaaccttaagaccagacataataccacttgtagtcaagataaatgtaaacaaatgcaaagatgcagcattaaatcatagctacctaatattaactgtagtacatactatactactgttaaaatctcatagctaacttctgttgctactgcagtgaactccagggttgcaagaatctgtttaaaacactgtgtgacactaatcatctctgtatgatcagctcatctctccagtaaattgtgtattgcaatcaaaagctatctctctcacggctcttgtgtgtttttcttttcttttctttttcttttctttttttttgcgacagagtctccctctatcatccaggctggagtgcagtggcacgatctcggctcactgcaacctacgccttctgggaaaaagcgattctcctgcctcagcctcccgattagctgggattacaggcacgtgccaccatgcctggctaatttttttatttttaatagagacagggtttcactgtgttagccaggatggtctcaatctcctgacctcatgatccgcccgcctcggcctcccaaagtgctgggattacaggcgtgagccaccgtgcccggccctcttgtgtagttttcattgtgtctagtgcaatgccgtaaaccttaacaccatgagacccatatgaagtgccaacagtgatgatggaagcgctttcaaagaaagaagtcatagacattataagaataaagtgacttgcttgatatgtacagtagataggtacagctgtagctgctggccatttcagacagatgcttcatcttgtaaacagcaacataaatgtatggtaccaataaatacagtacagtactgtaaatgtgttttctcttccttatgattttcttgatacatgttcttttctctagtttactttattgttaagaatatactatataatacacatacaaaatatgtgttattgcctgtttatgttgtgggtagggcttctggtcaacagtgggctacattatcgaacggtcaactgtatccttaactttttttcctcaaatacaactttcaacaattctagctttagctaaaaaactttagctaaactaaagaacttcagccattactctttcagctcctttatgttcacagaccaggaggtagacctcagaagtatatttagtgttcctcctaatattccttccagccccctttcctacagctttgcctatttcaaacccctatcactcaataactcttctggtatacactttttaaactcttgaccacaacgattttagcactttgttctcccaacctctctcttgatcctgaccaacacatcaccttcgatgaattcagctcctgctttactgggaaccctgaggtcatccaatacaaacactcaaaattcccttctcccatcttaaaatctccttatacttgacgtctcttcctgttcaacaagtttctattttggacaagtgctttattaattatctcctatctggcatgtgcctttattctctccacttgtctctaaataatatgctcaagtaatcttcattctttatccaaggctggcaaacaactgaaagaccaaaaacccacactctccctagattctgtatctctctcaaactattagcctccctctctataaacagcaaatcttgagacgctcttactccttaatccagagaaattgattatgaggctgatttctttttgaaggggaggggggtgccatggtctcactctgtcacccaggctggagtgcagtagtgcaatcttggctcactgcaacctttgcctcccaggttcaaccccctcagcctcccgagtagctaggagtacaggcgcctaacaccaagccctgcttgcttgcttgtttatttattcatttatttatttattaaggaggaacgagggttttgccatgttgcctaggctggtctcaactcctggactcaagaaatctgccttggcctcccaaagtgttacgattacagggatgagccaccatgcccagccgaggctgatttcttaatggtcattaatgctttgtcaacaactaatttcctgctgttttcacaatcccatcctggctgctggctgatcttttttttattttttttttaaacatttcactgaaaactttttattacccttttgggtagaaatgagaatttatttgccaggaaggatgatcccatcatacttctgctggaaccagcgcatggcctcctctttgctgattctatttggcaccaatgaagcctgtcccgcacttcttacctgcaatgatgaaacctggcttttccagcaccacatagaagtccaggctgtagacatcaatgcttgggtcatatctgatacccagatcaatgtgttcctgggtcccaaaaccaaagtttccagtatctgagaagttattttttcttaactcacactcctgcacctttagatcattctccaggatttcgtctgccttggcccctcgaactgtgcagcagacaacagtcttttcatttcttctgttgccaaaggcgctaacagtatatctagctttggaaaacacctggttctgacctgtaagctgttccaagaccttagttactcaggtcagtctgtctccactttctcctaaacagatgttgaagcggagcctgcagatgcaaaattcctgcatggggttatccttttcaccttgatcctgcaccacgatggagaacaggaagagcctggctgatctttctgcaatcattctgaaacttccctgcttctgtcataggacttactctctcaaggtttctttcaacccttattggttgtctcttctcttgtccctaaatataggcctatctcaaaaagagtttcccctctgtcaaaccaatctattccagtgctttaccaattttacacaataactccaaaacttatctcctttaacatgactttattcccaactgccagtgcagaattccaacatctggctggaatttctacctggtaatctcagaaatactgaaaacacacatttccaaaaaccgaagctttttaacgtggaaaacttcctttatttccatcaatgatattcaattattttctccagcactcgatggccttctaataactaacaccatcgtcacttattgagcccacactatattctttgtattgttctaaatgtctttagaaatacataatttaatactcataaaaccatgtaaggtaggtactattggtaaaccattttatagatgaggtgaagtaatggaactagatataatcttcataagtaatggaactagatataatcccagcactcaaactccacagcttctagtcaactactatatgatcctcccatcttctttctgcttgaggaatgaaacacagctgagagacagcagtaatataatagggttacagaaaagagaagtgagggaactccagcactatggcaaaggcccaggcagcagagtggagctaagagacacagtcagcctattaactacctggcacatacatacatgcatacacactaatggtacacaataaaatgacagacaaatcatagattaagttcatttagtatactcatctttgattcctacgcatctattcagttgccaaaatccagatcttgattctgaaatactactcaaaatgtcagtttcagttttctgtggcctatttcagtttcttcctgcaattttgccatagccaactgatttatcaccctttatccattctgtaatctatcctttataccactctcagattagttttttaaaagttaagattaatccaattaccaattaattcaaaatgttaaatggtaatctacccaaataagagcaatatttatcacacactgtaattcaatcacagcataaaaatacagctccaacctctgtttccactcttacctctcacaattcccttgaatgtactcttactttggccaaatagaagtatttaattttccctaaattgtaccttctggttttctctctttttaaatatatgctacctttatcagattaaggtataagggctacataagcagccacctgtgaagtctcacatatttttctaacacctggtccaatttagataacataattacttgatacttcaaggtgtgataaccagccacctgaaatgcaatttaaaccaggtatttcttgagggctcctagacattttcattattgcagggtctattcagattttgtctctcctcaaagcatttacaatgatatattcactgaaaattgcccacttctcactgaaatttccaaaatgattagcacagacctgaatataatttttaacatcacctccacactttagttttatctcctttctcatacttaatgtctcacttttagtttccctcttttcttttatccttgactggcttttaaaaatatgtattgattttattggcattttcatgcaatcagtatttagattagttcaaatggtttactgtttcctaattcattaacatttttgcctttataaatctctagttattaatctttagttctaaatttacatttcctcattgaatcaaaaattatttaaaacatgattttatatttccatataaatttaaacatttttaaaaatctccagttctaatgaattgtaatcaaggaatgggacttacatatttttatttttgagtgagattttgttttgcagttgatctaattagtaagactggtaattgttttgtcaatgacagaaaaaaagaaatatatttcattattttattattaaagccacctatatatatatatatacagttatgtgttgcttaagagaaactgtatctggatgatttcatcactgtgtcataaaatatacttacacaagcctagatggtatagttcactacacacccaggctatatgatacagctcctatgctacaaacttgtacagtaagttactgtattcaatatcataggcaactgtaacacaatgttatttgtgtatctaaaagacagaaaaggttcagtaaaaatggtataaaggatataaaaattgtacacctgtatagggcacttaccacgaatggagcttacaggattggaagctgctctgggtgagtcagtgggtgagtggtgagttaatgtgaaggcctaggatattactgtaaactactgtagattttataaacatgctactctaaatctgtttaaaaattttttctttcttcagtaaattaaccttagcattttataactttttcactttataaatataaaaaaatttaactctgactcttttgtaacatttaacttaaaacaaaaacatattacacagctacacaaaaacattttttctttgtatccttattaagattttttctatttttaaatttattttttttttttactttttaaactcttgttaaaaactaataaatacatactttagccttggcctctacaaggtcaggatcatcaatatcactgtcttccacctatacatcttgtcccactggaaggtcttaaggggcaataacatccatggagctgccatctcctatgacaataatgcctttatctggaatacctcctgtaggatctgcctaaagattattttatagttaacattttttaataagcagaagcacatgctaaaataatagtactgtaaacacgtaaactagtaacatattcgtttatcattataaagtattatgtgctgaacataactgtgctatgcttttatacaactgacagtacagtaagtttgcttacaccagcattaccacaaacatgtgagtgatacattgcattgcaacggcttcaacatcactaggtgatagaagctttttagctccattataattttataggaccattgtcgtataccaggtcaggtgttgactcaaacatcattatgtggtacatgactgtaccttcttacttcgtgccttttgaagtacattaaggattcctatcattgcttttctaccaattattcttcatttctttcagcttttacttaatacattttgatgtttagcacattcgttcataactgttaagtctttacctggagtgtaccctgtgttgatgtaaaatgacatttttgatccagtttaatgctttttgctttaaatgctaccctgatactgagattctgtcatctgcttttgaaattgaaatttgcctgatgtatctctaatccaccatttatttttaaccttagttgttttatgtaaatctcttgtgattaatctcttaaaaaacagacttcaaagtacagattatgtacatctttcagacctaaaatactgccatactactaccagaacagaatactactttaatatcacagcacaagatatgtaatgttttgttcatattctatgcatcaatatttatcaatattccgatcatctcctaagaagatgaatcacgaattcacaatctacactcctcagttaaaaaagtaattttctatttcaataaactttccactggcactgctaaacttagaaataatgtagatttttcaacataatagtgtttgcttgaagctcggaaatctatgtttcaggatgatcacaataagattactacaggaaagcaattcaacaaaggaagaaatatgattattattacaatgacaacatatagcagtagttattgtatattaaggtacttgccaacattttatatatctttaacactaccataactttacaagatagatattattgtctctatttttaggatcagaaaacagtccgactgcacgtaattatctcattcaaaaccaggatctggacctcaatgtgaatataagggtaaaacttgtactcagctgtcctgggttttactaatagcatgtatataaactacgtgatttgaatgaagtcacaacttcattgagttcttatttttcctgtctacgaagaatctctaaagtttagggtgttacacagtatttcacttctatgaaactaattattgagaacaaatgtgaagcagacaactgatatttttttctctttccaacattctttcccctccttgatttttctttggaaaactattattatccctgtgtggcaggctctacacttcagctttagatacatgccccagagaattccattccctggacagaatatttggttcaggaataataggcatgtgcctcaatccagggaaatcagaactcaccctacaaatttttgctcaaattgtagctctcttctcatcatagttgctaaagtaggtagaatgcaaacctgaagctattaggaactatatcttgccactacttgtgagagcctgtttgaaaataacatatatacagaagagagaaaagaggaggagggtaagggagggagagagaataagagagatactcttgagatctgttgagcacctagatccaggccagagcttttaggttatgtaagtcaaaaaatgtctccttttatttaagctactttgagttgggtttttcttatttaaaactgaaaaagtcctcatatgtcataaaggagttgctttttatttttctaagtttctatttctactttaggattcaaaataataaagaaaaataatttggactgcagaacatagtttcgtagaaaaaaataccaggtttaaggttagaagatggggtttttattattacacaaagagattatatgacttaggacaggttgatctttgcagatctgttcgttttgtgaaacaaggtctcgatctgttgcctatctgaagtgtagagcctgccacacagggaggctctaggctagagtgctgtggtgtgatcatggctcactgcagcctcaacctcccaggctctggcaatcctcccacctcagcctcccaagcagctggaactacaggcacgtgacaccatgcccggctattttttaaatatttttttgtagagacagcctctcactatgttgcccaagctggtcttgaactcctgggctcaagcaatcttcccgcttgagtctcccaaagtgctgggaatataggtatgagccaccgtgcccaaccctgcaaatctgttttatcatctatgttagaatgggtttgaattaaataattgctaagatccttcaaggtatgaaagttctacaattttactgtattatataacagccttaaataatgtgtatcatagtaacatggtttggcccaggaaaattcaaatgttaagaaaaataagaacgccacattggaagatttttaaaaagacagtaattatagtttgttttaaataaagaggaagtaagaaaatttcattaggttataacatgtagaaatttagtaaacaggctagaaaaaataacctgatttaagattaggtcatgaaaattcattccccagagaaaccaaacattttccttgagatcatttaaagatacaactattatttctagaagatttgtctttattaagaataagctcaatgaactcatgtacacaagagttcctaacatagagaaactttaataatttatttaaaaacaaaaagaaaattaaaagcagctcaaactttttccctaaaagtttaaccaaagaaaaaataagaggccaggcacagtgactcatgcctgtaatctcagcactttgggaggccgaggtgggcggatcacttgaggtcaagagttcaagaccagtctggccaacatggcgaaaccccatctctactaaaaatacaaaaattagccaggcgtgggggcaggcgcctgtaatcccagctgctcgggaggctgaggcaggagaatcgcttgaactcaggaggtagaggttgcagtgagctgagatgttgccactgcactccagcctgggtgattgagtgagactgtctcaaacaaaaaaacaaaacaaacaagcaaaaaaaaaaaaaaaaaaaaaaaacaaaaaaagggaaataaatatgaatgtttactttatgtgccatcattctggaacacagctgggggtatgcatgggacagggagaaggcaagggagagggaaacagcagtagtgtttctaagtaactttgtcatgtaaaaggagtttacctctttaaactcaaattttggaagtcctttcaaaaatacatacttactagcattctcaggatgttttaactctttcttcatagtttaaacatgtgagttatctaatattgaaacttaagtgcagatgcagatagtgtggagcacaggactagatgagaaccaaccctagaagttgccctgtggcatgctttcttggaagaaaaaaatcaccaacagcttacttttgaataatcttcacatgttcataaagcaaaagtgtcaaatatacaaatgaatgactcctaaggaagtgtaacacaattatcttcttgtaaattagtgaataagacagaaggaggcttccttcccttaagcggttacctcactctcagaacatttttctttataataactatcagttgtctgacttctctgcaacactgaaaacccaaagtattatttgggcattactaacctaatgcgttattttatggtcaacttgtacccaccactctgccatctaatttgcaccatgtctgctgaggatatgtcaagactctgagccagattattttgaagagacctctgcaaagtctacaaattctttaccaaaatatgactgcctcatctcccttcaaaaaagaaagggggaaaaaagattcttcttctatataaatgtcactagaacataattttctccagcttcttaatgtttgtctataattaaaattaaggatataagcaaaataacattaaagataattctaataaagttaaccccatacaaactgaaaagtagataaaatgcatgtatctcctataatggtgattcacaattacaaaaatgcaaatccacaggctcaatctacaaggaaatactgacaagaagagaataaacctattatgagatattccaagaataaaactactttagataatcaactacatttattataagatagttactcctcaggaagaattccacagttgtataacaacagctttaccatgcttagctaagttttcttatgatgaaattagttattcataaaagattaaaaattatttcaccagtattctaaccaacaggcaaacaagtggtatctttgaaagttttaaaacaattacatttcaagtattttacagaagcctgcagtattatatttccaagaccaacaacctcaatctgtccaaattccctttaagtcaggagtcattaaatgctttagcatttgtaaggaagcatttgtaaggaaaggtataagctgaggagcctttcaaaataagaccaattttatcagcatttcataaccttgcaggaaagcctgagcctatacagagattaattattttgaacagtctcaaaattcttttgcagttccaggatttgtggacttgatagtatagaaagaaatttaacagtgtatcagaggactcaaattttcctctgaatgctaatattaactggataatattgatcacaacacttccccttcctgtgcctgtttgatcatctataagaaacattcctggaagaaaaaaaaaaaaaaacctaccactgactttaatccgtatctagttttctaatgctgtttcaacctaaacacaaatgctactgttcagtaaaatatggtcaaccaacagcatctgctccattttttttgcctttttaaataaacacagggataaagaaggtaagaacacgaggatactcctttagattctgtgaataattcatccgaaatatggtctaagtatattaattaagcatgagccaagtatagtagatttcagttatttattttgactccaagacacaaaaagcaatcaatttcagtgaaattacttaactctgagtcttaatattatgtaacagctaaatataacaattttaatatctacattcttaacactgtatgtacagatctccattttctattaactattagcccatcaatctcttttcacttgggggatattccaacctatgcaaggatggagaatatacagctactagagcagttctactgatgaagtaaatactattacattttaccacatgatattataaactttgcattttattttcataacactattcttgctatctttcattctggccctatttcacaacaccctacaggacttacgatttcatcaaatagtctcccctcacctctgaagagaaacagaattgatagtattaccagactgtaatgactagaatatcttcccattggcaaatttaaaatatgtccttactttttgattatggagccttctcttggatttaatttggactggaaacagaaaataaaatacaataaagtttaaatgcccttgggttttacttttatccctgaacatgatgacatggactatcccaagtccttcttaaatggcaagttctcatcatcagcagagcacagccaactattctgaagaagcagatacatcagacagggtatgtatgcatatgtgtgtgggtgagagtgtataagaaggaggaaagagggagaaaaagagaccacatgtgagagcacagttaagttggaaaagcctagaccattacaaaaactatttgttccaattaaaaatcattgattaaatcatcctactaggatattgattgtaatgctaaacaaacaaaaagtcacacagttgaacagtgaaggcaagtatcttagaaagagtcaaatatacttgtagcatgaagaagaataagactgttgcaatacctctatcaaatacttttctccattccaaaaaaaaccctgacattaaaaaaacaataataaagtaggtcacaaaaagattggaagtaccacctttcttcagatatgatttctcagtatagccggctacaagttttcatcaaatgcaagcatggtgacacaatcaaggaaacattcccattttggaatctttttggaagcttcagaaaacattaacactttcaaaatggtaaagtttctttaccaaaaaacttctcctgaagaaacctcagtattctgtaggcagacagtacaccttactgccagacaacacatctgatattggggcactggtaaagacagaagctctccatgtcatggtcacccactgctctcttcatcagtatgcgctagggtgcaagactgtcatcaatcctgaaagaaatcttatctcttgttgtgaaagtattctactgtttcaagtgccaacccttgaataattccctgtgtaagatgatttgtcatgaaaaatccactattgtgaaagctgccagattcatgaaagccaagactttcaatcaagagcttctcgagaggttttgtcaagaaatgggagcactatgaagttctttgctatatataagttccctgctttcagaagacaaattctacagcctgatactgctgtttacaggataacatacactctttttaaacagtttaactcttcaaccttgaaagtaaaatgtggagtcataatcttttctttcctaacacagcattaatgatacagatcttgccaaaaatgatctcagtaacttgaaggcaaagaaaatgatgaaacatgaatttatctgaagagccttggagaattcttatttcttgacacgtctactttcatcaggcaatagaatctacagattccatttactcttctttcttttgtaaaatagcattttcagcactttttaccaaagtcaacactgattggatatcaaagatcatataaaagttgcaaagtcaaagtcaaagagcatagtttcaacttgttattttaaaagttaaatagcagtcttttcattaaaatttagtattgaacagaactaaagcttaattttggttaatttgtaccacttagatttattcattgctctcatgtagtagccactggtttttgcataaaaaagtgacatagttttcatgaaggttcttttacattctgtctaaaagaatatatttcaatgtaataaaaactgcaaaattttatgtacactatgcacattttttgaggggagaacatttataccttccatcagactttaaaaggaatgtaacacaatttaagaccccctggcttaaatctagtgttctgcgcctccacattacaaaatttttctattttattacaaaaaattttttacctttttttccactaccaaaatatatgctgctcatcaactctgttttaaatttctaccatcgcttttgctactgcatttttttttttttttgagatggagtctccctctatcaccaggctggagtgcagtggcacagtctcggctcactgcaacctccacctcccgggttcaagcgattctcctgcctcagcatcctgagtagctgggattacaggcacgcgccaccacacccagctaatttttgtatttttagtagagatgaggtttcaccatgttggttggccaggatggtctcgatctcttgaccttgtgatccgcccgcctcggcctcccaaagtactgggattacaggcgtgagccgctgtgcccagcctgcatttttaatcagtaaaagcaattgtttccctgcagatgataatgggataaatcaaagtaaaaatctttagatcctcagctctataattcatgccagtgctatcattccaaggtgcaaacaatatgcagaaatgtaaggcaatctaccataatcttcaacattcaccaaaattatgcactaatgtaagattcaattttgtaaactatcaacaataaacagtatttcggcatccttatatataatgcaaaaaaagtcacaaaggataggaaacaagatataagagggggtaaaggaacaaggaatctatgcaattacacagctttaaatgattaatacgatcattctatttctgttttacagctgaattaagaagaaattagattaacatgaaggagaactctctaaatgagtttttctatctatctggaggggcttaggctttgtccttcttagagatggaaaaatgtacaaaatctctttgcattaaattttaacatgttttgccatacttaccacccaaagaaatatatcaacagcaaaattaaatcactgtaaaagttctcccaagagttttcttttttctttcagatgtactataagaattaaatttgtcactgatttttcaatatagtccttagttttctgatcaaagaatcgagaatcttctattaatctaactacatttatgaatattcttataaaagaataatttttatggattataaaagttcacactttactaggtaatggtattttatccaaaggcattctatgctcaaacaagcttcagaaatataaagcttatttttgattaatatgctttttaaaaatgttattttagaagaattttgtgagaccaaatctgcaatacagttaatgggtaacatgtgctagtatgatatgaaaatggtagcgtgaacagaaaaatgaaatcaatcagtcatttctcatatagaaattgaggcagcaactgatttaaaaatttagaagaaataaggattagcaactatctttaaaacctgttttccagggactgagggtggggagggaggaacacaagatgaacaagatctgaagctctactggacagcatagtgactatagttaataataacattgtataattgaaaattgtagcttgtagatcttaaatgctttcaccctggggggagaataataattatgtgaggtgatgaatatgttaagtagtttgactgtagtaatcatttcacaatgtatatacacatacatcaaaacatcatattatacattgtatttatatataatttttacttgtcaattacacctcaataaaactgaaggaaaaaaagaaacccaaaatctgttttccaataaattctcagatccaggaagaggaaaggaaaaacatcaaaaaataacttacctttttgtctctggtccttacttccccatagaaatctagggcctcttgtgcctttaaaaatttgccccgatgtaataaatatgcacatatcattacaccagttcgtccctttccagctttacagtgaattgctgcaacatgattgtcatcttcacttagccattggtcaagatcttcacaaaagggtttgataagttctagctgtggtgggttatggtcttcaaaaggatattgtgcaactgtggtaaaaagataacctcagaataagaaaaaaaaactcttgaatttttaattaacaagtaggtaactttagaaatgttgcatacaaacttaacaggtatttaaaagaaacactggattccagagaaaaataatgtattgcttaactttctaattgttaaatagaaaatagtctcttgataagtcttaaatataatcattaaggaagccaggtattattttcccccattttattcaggaggatatattctgggaatttacgctatacggactggtagcataggtcacatattagaggtagagctaaacccaaaatgaactgtcacatggacatttcgtcaggactctcaatgcaaaaggaataatactatttatagtatttatttcatcatcacaaaacatattccaaagacagaatagattactaataggataaactatgcaaagaactacatattacatttcataaaataaaaatgctaagtgtgttatttaaaggtggtcttgcaaatgttagtgttgtatacacatgtaatcattagggaagccaagtattattttcctccattttctgcaggagaatacattctgggaatctatgctcaatggactgcagcataggtcacataccagagatatgtgaaggcatacaccaaagaaattactcacaaaatgtatataattgttatcaaagtttcaggtcttctcacatgaattgtaagagtccaagacttctctgttcactatagtcagagttgaggtttttaaaaaaacttgtttagaaacaggactatagatatatcactattaattgctcttaatagtttctaccttagttccactctattaagatccttaaaaaccctggctgatattcaatgtactaacctgtgtcatctaaatatgtgagaagtatgtcttatatctccaatcaggtgactcataatatggtacaggatataatcaattatcctttggtgtgacaggagagatcttctggtagacaatgactatcattataaggagtcagcaggacagctttcacttagtcatctgcctaacttcattttcccagtggtacacaaaaacctccaggaaaatctgttaaatatctgtttaaagcaagataaacctcaactaaagcctgctttgcttagtaagcaacagcctaaatccaccaaaaacaaaaacaaaaaaaacccgttcttagtaaacctatactaaatctcaatcattagtgatttagaattttcaaaccatttgtctgaaagtccattctagattttcaggagggatcaatggcaaatacatcaatagtagctcatggcacccactttctttttgactatcacagcagcatctgccaagcttctcaactcttcagttttctcatggtttaaagtgttaagccatgagaactgagttgtatttcacaaataaaagtgaaagtttttgtgggctctgagaattaacttatgtctgaagtagaaactcatttaaagcagttccctcctctcatccatcagactcctcttatcaacatttgttatatcctttcctaccttttatgtcattcctcaacacagaagagttaagtagttctgctttctccctgtgattgcttactattagaccaactgcctcaaatagtaggtaaaccctctccttatactatttttagtctaggaattttcctaattcttagtctatgctgcactttagtcttcctgacaatattaatagctttatgcaatactttttcctaaaacacaacagtaaaattaaaatttttgaaatttttaaagataattcttaaatatgtatctcactcgataatctggatgactcattattgttatgacagtaagatacagtctatcgggtttaagttatacaacatagtacagtacattcatacctacctctgcaattaaatttggcggtgtcataatgtctttcagcacaactaaaagaaaagtttaaaagtgatataaagttatcttttgcacttaggaagaaaaaaaagtactaatactaacaaacattgcctgaatctttataatgtgacacatattatgctgtgtttaacattaattatttcatgtaataacaagaattctattaagtagatactgttatcacccccatattataataataaaaccaaagcttaaaagattaagtgtatgcaattagagctaatacatttgcttaaaaacttgtgatgccactaatacagagtactgtaaattcaggtgcttccatgctttcaaatttcctctatgaaaaatctgcatgctattggaatatatttttaattttacaagtacctataaacaactgactagtttcaatagtatctgtatctcatagttaagcatacataattctcaaactattcttcaaaaagatatatgttaaaaatagtaaaagcataaggacagtaaagaaaaactgaatgttgttaatctacttggccaaatgcttactaatttttttttaaaccagaccttactccctgttgaaaagccaacgatcacctttttcaacagtctctcagattgcaagttttaattacagtatgagagtaatgaaagaataagtaaaatcaatacagaatagtaaaatgctgacttgtcattactagagtatgctaatatttgtcttaatagcagtgatatgttagtatgtactggctttctaatgattaacaggccatgtttacaaacaataaaaggctcagaaagagatcttacatatcagtgtggttagcagtaccctggtaactccaactactatgcaaaacaaattttttaaaaattacttaaaataaactcttagcattttaaaacaaataaaggtccatagctccttaacctgcaatttcaatatcccaaaagttcaaaacatctaaaattttctcttaagttttatggcaaactcaactacagcaaatcctgatctgaagtaataagattgtacataatatttaatacacttagagcgaagagtaaaacatttcatttcaggtactgacccacaccccactggggtgtttatgtaaaagtatatttatctgtgctaccttttgaaaactaaaatttctgaaaatggaaacatacttggccccaagagtttcaaataagtgattgtgaacctgtattgtacatttagaaaccctgaaaaacatctatatagtttcttctctaccttaaaggtaattcaaaaccaaattcacatgaaggtttaactaattataaataaactacaatccattggtttctaactggtcagacctaaaataaaacaactttcatactaccactcaaaacaaaacaagcttttcctttttagtacaatttagtatattgagtttttctagaaagaaaatgcatttagtaatgacatatgcacatatatgcatccttgctagtaatttcatacccactgacatgaaaaacaggaaaaagaggactgacaagacagtcacattttacactttctttggtacttttaagataaaaggggagaaattgtcaatagtgaagaattcataatggaatattttataaggaatcagagatgtaggactaggaaacacaatctaagaagctggtctcaggacaacacaacagaaaataaacattagttttgtgcagcttcagttctctaaacttcccctactttctcaggatcccagaacatgtggtttgacgaacactccttaagactgctttaataaaaatgcctctcaaatattactgttaagaggactatatggacggaaagtggaagtaatgactactaagtgtcaaccagatgaacacaccttacaaagagtttccacttttttttgtttcatcctcacaatcacgtgataactgttattatctccattttatatatgagaaagctaagacttaagagcattaaaaaacttgccccaaataacagtatacaaatgaaagagccagaactcaagctcagtatctctgattacaaaagtcaaactttttctactactgttccataattctacttataataaaaaaaaagttttaaatacaaaagcagtaacaaatttcagtcaaagccagcattcctacaagagcagtatctgtcataaatcacagaaccaacagtgacagtaaaaagcaaggaaaaagttatgaaaatcttcacaggtaagcataggaaatatgggagcaaatatgctgggactagtaatgataaatatgctcagggaatgggggttggtaggataaggatgaagactttcttcttaaattaaaatctctgataaatgccctccttccacctatacctactgacagtttcttttaaattctttgtggtttggtagtgataagtctctcaacaaactaaaattaaagatacacaaatggcaaatggggtttagccatttaaatttaaccatttatgcttccttataactaaaactcaaaagataccagtacctcatattggtttatatgagacaagagaaatgaataagcatttaaagaatgagtttttatgaaacaagaggcagaaactgaaggaataagattaacaggaaaagcttccagagaagtgagatttgccatagaatcagctaggtaggcaggtctcttctttactctctttgatgaagctatcaccatcttacaaaagaaaacttaatagatgaaaattagtaaagctaaaggtttaccacaaaatgataaagtatgtcaaataaaatatgcactgaaatatagtaaatacctttaaaaaattggtatacagtgaaaacttaaattcctcaaaggcaagaagtatacatctctttattcactatctccccttccccattcctaccagattatacaacaaggaacaaaaataaaatatacttgtacaaaacaaactgattaattcaattaagtaacagtacacctgaatttgcttaatgttatgaatgcctgaagaaaacacagatataaacagatacagttaatcagaaaggccatattaggaactcttcttcacccatgtatatcataattgctataaaagatttaacatactattaaatgtgggtatgcctagtgcaaatattttaagatcttcaaattatgtatgtttgcaaagacatatatatcacatgtaatactatcctaaaaataaaagaaataaaatagaacacctgctgcttaccagactcacttaaccagaaccagaaatacaaacagaggtagaaaaaaggtaaagaagatcggaaagtgacattagaactcaaaacatgctataacttagttctagaaacttctgaagtcagtaaaatttggagaggttaaaacgaacaagcaaaaaagcaaaacgtaaagggaatattggcataaacagtggatggtcggctaccatatgtacctgtgtgaccttgttcaactcacttaacttctctaggcctcagattccccatctgtaaaatgagaaggttggactaaatgatctctttcaggtactctccagttctgaaagcttatgattccatgtggggaaggggcattaaaatatatgcattaagagctaccctcaactaataaacagacttcattaacttgggaatccaatggttggaaatataaaaacaaacaggcagttaggttcctaggctctctccaatgccaactttaaccataataatgttaagtggcctacaatactgatagtacagctgaagtcctaagttcttaaagcaggaagtcactacacacaggaatgaaaagaatttccttccctttctttgaatatgttaaactagaataaaattttgaaaaaggccgaatttgtctttggtgtccttcgatttccattctgagactttctaaatccccagttctgatagtctaaccctgaagtgactcagtttaatggcttctagcttttgaaagttcttgtccttttttattacttatattctgaatccagttgtgcaaaaaatacaaagctttgtagtttttattttcctccaaagaaacactatggtatccgcaacaaggctctttgtaggagaggtttatcaggaaaagagaaagacccctaaatgcatagatcatttgtaagctggacccattaagtttccataacaccttttactttcttttatcttgttgcctattgccaccacaattctctcccacccccaacatacagacaccacaatctgatgataatgaattcgctgccatattctaaacacttttatgccaacaagcttcttacaatgccattcctttggcctgtaacatcacttcccctcctctccttggcttgaaagtcaacccttactggtccttttcaccccagctcaaacttgccttcctttatgaaaccttctttataaggtaaaattagtgtttccaatgttctcttcattgcaaccttctatagcagagttacttcttctgtaatgctttgtctaccttttacattagaatgtaagcgacttgagaatgggagctacatcttactcacctctgtacacacccccccaacatgttttgtgttatctaataagtgataaggacttaacaaacgtttgttccttcatgactctgagaaaaatcagtgaaaacttactgagagtaacaatatcaatgtccactccactctcagtacttctgacgttttatcacactagaaagatcactaaattacagataaatttttcctatctataatttatagatatcacatgggaaagataaaagtcaagtaaaaaataacacgttttatgtgccgatttttacaaatcagaaaatagtcaatattttgagaaggaaaaacagtcttcatgggcaaaaagagttaagttttctcttccttccttcctttttaccttttcacatctctactcccaaagtcaaaagaaaaacaaaaagttaaagataaggtcaactagctctatcaatcaggtgggcagtccttaaaactctgtcctagacaagacaagccacctaattcagcaattttaaataacttaggtgatgtacagttagagaatgccctaacagctttttcagtcaatagctctagagacacaggataaacaaaattatattcactctgaagtatacctccatggaagatgctattagtgctttaacagaagctctactgtgaattacacttcaaattaccacacggttatgggctcaaatatgggctagatgccaagtcatttaaagcagatcaagtaacatgaatctgtgccaacaatgttttacctcatcactacactttctaaatgatctaacaatgctcttggacttcttgacttaatcggtttaggaatacaattctgttaaaatgtatctttaactctacctcactctaacaagcagataactttcacttaatagttgttttagaagatatttgcaagcatacaaataagaaaacatacttacagattgtatatcttgtaatggtttttatgctttgaatccaaaaaccttaaaacaaaacaaacaaacaaaaagccaccattaacaaaaatgagctaacatttgaaattacattaatactatcaagaaaaaccaaaagacagattttctttttcctaatctcaaataccatttaagtgaaaataaataatccaacaaataccccttctatgggtttagagtagtaatcatgtcattcttaaataattattacattacacagatttatacaatctgaagtaaaaccagagcttttcagagaatattttcataatcttctatcttcaacctaacataatgagactgaatattaagacataacttctttaaaaagcattagcatttagtgcaagtatacctagctcatagagatttacaagacagtcataatcaagtactcttaaaaataaccctgaaaattcagacatcattttcccatcaaactgaaaacttttgatatttgaaagatccacgtactaactattaattctgtacaaaggtattaaacattttcacatatatactccattcgaccctcacaaacatctgagagctagagcttattaacactatacagaagagggaggtaggtctcaaagagattacataactcgtccaaggtcatgtacagccaagaagtcaaagaatcaagaccaaagacctttccctcaagacagttatgaaagtaaacaacaattacagctaacacaagcacttactatatgacagacatatcctaagcacctcaggtatataaactgtttaatcctcaaccccataagataggcaaaagaagggctagaagaccatgaagccgaggaattaacagaatatacagaataaaaagacaaatgaaaatcagaagactaaacaaaaactaagagttcaggatgttaaatatattttaggagttccagaaacagagaacactgagaagaaaccgaagacataactcaagaaaaatactcaaaagtgaaggatgtgagttttcaaactggaaagttgcatgagtacctggcaaaacagatgaaaataagaccaaaatagaagcacacatatctcatgaaatttctgaataccaaagaaacagaagatcctaaaagctgccagagaagaaacaggtttcataaaagaatctagaatcaaaatgacattatcctttttaacagcaatactagcagctaaaaaacaattgggcaaaaccttctgattttgagggaaaactcttctcagcctagaattctataccaagacagactataaatcaagtgtgactatataataagggcattttaaaatcagcgaaatctcaaaccatacactttgtcaggaagttactaaagatgtgctccgccaaaacaagagtgggaaaccatgaaagaagatgacagtctccaagaactgaagaatctaacccacaagagaggaaaagggaatccctagaatgatggtgaagggacatcttgagtagacagccatacagcaagccaggaagaacaattagtccagactgggacagattagaaggcacctggaaaagataaaattgatataatgccaaatgtgcttaaacatgttgagagatttatacaattaggggtgagtttatgaattaaagctaagaacattgaaaactaatttttttaaaaaaaagagagacaactgtgaagtccagaaaaaataaaacatgcaggaaaaaagtcacaatatactctatcacttaactatgaatggcatttatctagttataatcccataaaaactcaatattgatataaccaaaattataatgtaactactggcaggaattataatacaactactggcaagaagaaggatgaggaggaagtctgaaaatatgtgtgtggtgatgtggaaaaaaagagtatatgaacttgaatctgaaaaattatgttacaaagtactgcaagcagtatttgtaactgtcagcaacataaattatatatttttatatcacactacagttgttgcagataggctaccatccttaagaacaaagaaacatagtgccccttgctttcagcatggtggctcttctctgatacagaaggaaatggaactcaagtggaacacagatttcactgaggtaaacaggaagagattagactgctaaggctgttggagtttgtggagcaagggactaagaattttgtatggatttcatctcaggtccttggctgggggctgggctgtctatgcgcaggatctgaaagcataacggagatgacgccagaggtaacgaaatataatactgggagaagctggagttctggcctaggcaaagtggaagagacctcatggaacaccccagatacttagctgagacattggaaagggcaaccttgaagttaaaaaccatgccctaggacaaaagacaaatctgaaaaatgcctgctttaacaaagagaaccaaacctgacaatactaaatcaactatcaatttaaatgcctgacaaaatgaaactcagcacccttaaaggaagtaacaatccaaactccctacatttcaacatacgattaaaatttactagacaggcaaagcagaaaaacatgacctattacaaagaaaaaagagcaggcaatagaatcagactccaagatgaaccagatgtttgaattaacagacagtgactttaaaacagttactataaatatgtacaaagatgttaaaaaacaatgaatacaatgagtgaaagatggaaagtctctgcagacatagaaaatacaaaagacagcaatttgaggcctcaaaagtacaatatctaagaaaaaaaatctatcggatgatctcaacagaagattgtaaactgtagaagaaaggtgtggcagattgtattttccaaaaattcatttagcaaatatttatcaagcacctgttatgtaacaaatactactgtgggcatagcggcaacagaactcgaagtaatgacaaccataataatgaatgcttctagcagcctgagaaacccgatggagaactagcttttggtatctcatttggaaaacagcctaaggacattggacagctcccaccaatcctaaaataaacgaaaagaaaaattagcatctgaaaaagtaaaataattatttatttgctactttttcccatggctaattcgctatttggtaaccatatatatttccccttgtattagtccattctcacactgctataaagaactacctgagactgggtaatcttttagaagaagaaaggtttaatcagaggcctcaggaaacttacaatcatggcagaaggccaagggaaagcaagcacgtccccgcggcaggagtaggaggaagagagagagcaaagaggggaggtgctacacacttatatacaagcagatctcaggagaactctttcgcgagacagctctagggtgatagtgctaaaaccattacaaaccactcccatgatccaatcacctcctaccaagcccctcctccaacactgaggatcacaactccacatgagatttgggtggggacacagagccaaaccttatcactcctgctacattcatgtttaatcaacatttgctcttagaaccctagtgtaactacagcggttactgctgttactaacgcataaatttacacataaatcatccctgccttaatcccatcaacacaggcaagctccaaacatttcaattcttaactaatgcctcctgaccatcttcaggatggttattagaattaattctgttacgtatccaatacatggaaagtaactatcttgtttaaaatgttcttgtttgtaactttcacctgcacagtactgctttctcctacattgcctcaagttaaagaaaaaataataacagttttgaataattctgctcaaaaatagtgattcctagtactcaagaaaatctaatctctctaaataggtataaaactggagggaaaagaaataaacagtgccaggccaggcgcagtggctcacacctgtaatcccagtactctgggaggccaaggcgggcagatcacttgaggtcaggtgttcgagactagcctggccaacacagtgaaaccctgcctctgccaaaattaaaaaaattagccaagtatggtggaacgcgcctgtaatcccagctattggggaagctgaggcagggagaattgcttgaacccgggaggtggaggttgcagtgagccaagatcgtgccactgcactccagcctgggcaacaaaacgagactcctttaaaaaaaaaaagaaaagaaagaaaagaaagggaagaaaggaagaaaggaaggcaaggcaggcaaggcaaggaaggcaggcaagacaggcaaggaagggaaggaagggaaggaaggaaagaaagaaagaaagaaaagaaagaaacagtggcagaactgacctataactcactaagaaattcagaaggctatcaaaaataatcttaaaaactgccaaatatttctcccaagaaatcatatcattttgtgctctaaccaacatgcataagagttccagttaatctatgtctttgccaattcctgtaagccctttttgagccattccagtaaatatgagctatctcattacgtttaaattttcatttccctgatgactgattttaaacatcttttcatatgcctactggccatctatatatcttcttttgtaaaatttctgtttccattttttgtttttttttttgtttgtttgttttgagacaggatctcactgtgttgctcaggcaagcgtgcagcggtgcgatcacagctcactgcagcctccgcctcccaggctcaagctatcctcccacctcagcctcccaaacagctaggactacaggtgcatgccatcatgcccagctaatttcttgtatttttttattttgtagagactgggtttcaccatgttgcccaggctggtctcaaactcctgggctcaagcaattcacccacctcagcctccaaaagtgctggcattataggcatgagccactgcacccggcctgcccttctctttatggggttattttctcattatgaagttgtaagagcatctttatgtatatattatacattcaagtcctttttcagatatatgtattgcaaatattttctccaaaactgcttgccttttcattttgagtctttcaatgagcagaaatttttaatgttgataaagtcaaatttgtccattttttccttatatagttaattttatatgtactgtctaagaaatctttaaaccaaaagtcacagagattttctcctatgttttcatctagaagttttatatttttaaattttacttttacatttaggtcaacaatccacttcaaattaatttttgtatatgataagacataaaagtcaaggttcactttgttttctctattgttccagtattatttgtttaaaagattatccttttcccatgaataatctcagcacctttgtcaagaaatgtgtatgtgaacttttctggaatctactctgttcaactgatctacatcatgtgacccaacaattctactcaaaggtattgaataaacagaaacaaaaatatatgtccacaaaagtcttgcacatgaatgcttacagcagctttgttcataacagacccaaactgaaaacaactcaaatgcccaccacactaataaagaaatgtcatatccatacaatgtaatattagtcagcaataaaaaagaacaaattattgatactagtaacaacagggataaatttcaaaaatattatactaaaagaaagaagccagacacaaaaaggaatacatgctatatgactgtatttatatgtaatcctagtataggcaaagcatatagaaagcagatcagagattgcctgaaaccaggtttggggactgactacaaatgggcatgagggaaacttttcataaagcgagtgttctaaatcttggttgttgtgtttacaagaaggtgtgtgtttacaagaaggtgtgtgtgtgtgtgtgtgtgtgtgtgtatttctcaaaagtcaatgaaccgtacatttaaaatgggtagattttattgcatgtaaattatactccaataaagctaatttttaaaagtaatataaaaaaagtaatataaatagcctctgatttagaaatatcagtatgtaaaatgcaacctacctttaaaaagactcaaatttattttgattaagctagaggacagcaacagaaagagtacatcaacttcaggaattagaactttttagaatgagaggcagaatgacactgtatagaacagcactgtctaacagaacttttgcaataatgaaaatgttctgtatctgtgctgtcttaatacagtaatcacaagccacatgtagctactgagcacaagaaatgtagctagcaaaaacaactcagtaaatttattttattttatttacatttaaacataatgatagctacatgtggctagtggctacctacactggataacagatatctaaaggatatctatctatgaaaaaaaaaatctgctgggatacaatacacatgctccctagtcaggtagtagaaatgggtacatccttagaatagagcataaaattggaacagagaaaaggtacagtaaaaattagagacttcacagctgtcaaaatatatactaaacatattttcaactacatgcagttttccaataaattcttgccatgcttgattaatttgcttctgtcattagattagaaagaaactacaattctggatatatttctaactaagaatgaggaacaagtttgagtggaaatgccaggaaacagggagaaagtgttcacataattttagagttcacgtcagacaaggaaggaaatactggcgtagttagatatgatacagatcagtaaaacagatttcaaaagcttcatttaaataacaggctatgaattcataactcaacctataatgaaagacttgtggttttaaaaactaaaattctgtataaacaactacaaatgactccagtttaaaaaagacaaaggaggaaatacacaaattatctaaaatcaaccaacacagctgcagtgaatttaccttcaaagctcagattcaaaacgtacatatatatattataatagccaaaaaaggggatgagagataattacagatgaaacaaaacagcagcacatataaaggaacatgaaaatagtaaaaacaaaaggcttggaggaggggagaatgttcacaccaaaaagaacaataaaaaaattaggccaggtgcagtggctcatgcctgtaatcccagcactttgggaggccaaagcaggcagatcactagaggtcaggagttcaagaccagcctggccaacatggtgaagtcccatatctactaaaaatacaaaaattagccgggcatggtggcacatgcctgtagtcccagctactcaggaggctaaggcaggagaattgcttgaacctgggaggcagaggttgcagtgagccaagactgtgccactgcactccagcctgggcaacagagtgagactttgtctcaagaaagaaaaaagaaattagactcccacacattaaacagctatataatgctaaagacaaggaaaaaggcaggaactcttaaattcccttttcacttttatcttctctatccaaaagaagatgattcagtaagtaaggagtagtgggtacatgacagttctctttattgaaagcatttcctacttgctaatttaagcaaggtgacttttaaagaatatttcttaataaacaatcaataatgcaaaacaaaagataacccaccaagttctttatgctattattgtttcatctgaattttgtagtcacaaaattcaaatggcaagagaagcagaacattagacaactgtctgaagaaagaataaaattggtttcctgaaaatcattaaggaaaatacaaacaaactaaaagaaaaataagttgaaaatagggtcagtatatacatacacacacaccagaaagtacataagaccaatacatcaaaaagtcgctaaacctcacaattaaaaaaacacgatcaaataacaagataccattttttgccaacaagctataaaaagttaaagtttgaaactattcagtttgccaaagttagtggggatagaaggaagaagcactcttaaacagtgagtatataaaataccatttttgaaggcactagtttaaaccatagacgcaatggacctagcaactccactgctaagaatttgccttaaagatatacttggaaaagacaacaagatacatatgtgaactgttctcaatgacaaaaaaaaaactggaaacaacttatatattcatcataggggcctattaatgatagcatgatcataaaatgaaataaaaggtagttaataaaagaatcaggtaggtagatgtccacaacaatatggaagattcctcagatataaaatttttgaaaggggccaaacagtggtagtatgttcccatttgcttttcttaaaaagtgggtaaacaatgaaaacaattttcaaaagaatatgtgaaactttaaattacagatatagttaggaagagggtaaaataggagaaatttgtaggggatatttgtcatcttcaggctgttaggcaaccaaaataccatttcaatttggagataatttcaagagattagaagcagatacttctttcctcatctttctcttaacacatgtacaggcctgataccaactattaatagatctttttgccgtggataccgaatcctagtgaggacaaggtacaggagagtcagagattattcctagagatcaccagaggaggtgagttaatgagcagagtcaccagtttcgaggcatagtggcagcagctattacaccaagtgtccaagcagcaaagtcctaagcagattgctcctgttgaaaccttggggccatgtcttgcttcccttagcttccacctatcttccaagtcttgttgtcaaactatgacctacctaatacttttttaaaaattcctttctgattaggtaaatcagagtcactttctatcatttgcaaccaagaattctggtttcttttacagcattttcccataattttgtttttagtgagggctggtgaaaccatgctcttttgtgagctccctttaatatttgaactttatgatttcttacctaccactgtgaacaactgtgagacttgcaggagaataaacaatctatttaaaagaaagtattacaacagtttaaaaaggggatgaggttatgttctctcaaagaacttgactataacttagggaaacattcaccatggctgcccctcccacttccttctctttcctcccaaggatttcatgcccacagttggctgattgccttataagtctgacacaatggaaaggcggaaaaaaagcaagaaaacagcactttccaaagggaaatgggaaaatttgcctatagatacttggaaagtagagactaaaaaagtagataaacaaaagcagagaggtaatactcccaaaacttggataatctagactacaaatctttctaatataaacataccttacttccaataatttcaatatataaacatctaaacccattaatgactcacagatttgagaacacagtctttttttttttgtactttgtgtgtaaattatacttcaataagcctaactttttaaaaagcttcacatgctgcaaaatatcccttatgggcagacctcttacctgggcaaggaaagagagcagaaaaaagaaacaagcacaagaatgtggggctacttaagggagtgtagtagtggggcactgacagcacagacctcggtatgtctttgtgaagtctggcggtcttggggattaagaactggcagctctgattgttagtctggagcagcttctacctccctgggaggccactgtgctctctatcccacccctgagggattagggaaggaaaagcatagcaggcttgcccagggcctgactacgacccaggtaggtggggacactaggtacctgccccagcagagatggctttcaggtatacaggttgctgcgccttctgaaactcacagggcagcactcagaccatgcaggcccaaagccctgatgcctcctgcaggttacacttcccgacacttgcaaaaggctagcacgagaagcacccataagcagggtgagaaaatctgtcttcattttttaaattctttactttcttcacagttcctatgaaacagatctaaataagcttcaagaatacgttttaaaattatttttgacaaaataataaacatatacctttcaaatgataaaataaaaaaagtttggaataaaaaatttgtctaagagctgggtgcagtggctcacacctgtaatcctagcactttgggaggctgaggcgggttgatcacctgaggtcaggagttcgagactagcctggccaacatggtgaaaccctgtctctactaaaaatacaaaaaattagccaggcatggtggtgcacgcctgtaattccagctacttgggaagctgaggcaggagaattgcctgaacccgggaggcagaggttgcagtgagccgaggtcatgctactgtactccagcctgggcgggcaacagagtaagactccatctcaagaacaaaaaaaaaaaattagtcaaagaaagatggcagaatcagaagtaccaggaacccatctccccacctagacgactgtaagcagaatctgtgattctggaactctggagtctattcaggttttcagtttctaaggaaagacttgaatggtaaatcagttagtttgagtcaatttcagctctttgtgccgtcgcggctacccatcacccactctcaaagcaggcaaccatgcacatgttcccagagcaccctgcacacagtttgtaagagtcaaggttggcaacaaagaccttgccctccaaatatcaggaatctgtgttctgattgctaattgctgcttctgatcaaaatgtgacacagaggcagactatcattatttaactgccattggctgaaaaaattgctccagggatttaaagatccagagctatttcacccctttgatttatttttaatttttaatttttatttatttatttatttattttgccttttaggagccaaacatttaaggaggatactactgcaaaagaactgcatacatagggcaatttagaaagtcactacacatgcccagggaaaaacacaggccgagaagatcttaagattacacccagcatagaaatactctacaacaaataaaaaaaccaaacaaaatagcacatcttagagaaaagagaaaaatctaatttccaaagttaccactctttaagattcaaattccagtttttgacaacaacaacaaaaatcacaaagcataccaaaaaaaaaaactaccccaagcaaaacattaagtataggccaaaaggaaaaaaataaattaacagaaactgtgcctgagaagatcagatggcagacacttactagacatagactttaaaacaaatgttgaaaggtgctcaaaaagctaaaggaagatatggataatgtcaaaaaacaaaattgaaatatcaataaagagaaaacataaaaaaatcaaaaaataaatgctggagctgaaaagtacaaaaactgaaataaaaatttactagaggaattcaaaagccaatttgggcaggcagaagaatcagtaaacttggaaggcagaacagctgaaaataccacgtgtctgaggaacagaaaaaaaaaactgaaggaaaattgaagacaagagcctaagacacctgtggaacaccatcatcaagtggaccaacacatacacactctgggaatcccagaataaaaagagagaaaaggggcaaaaaagattatgtgaagaaatattaatcaaaaacttcccaaatttgatgagacatgaatataaatattcaagaagctcaattaactccaagtaggaaaaactcagagatccaagtaggaaaaactgagatagattataatcaaactatgaaaaaagagaatcctgaacatggaatgagagaagcaacttgtaacatacaaagggatcctcaatatcagcagatttctcatcagaactcttgaaggacagaaggcagtgggatgatatatttaaaatcctgaaaggaaacaaacaaataaacacaaatacctgtcaactgagaatactatatccagcaaaaatgtccttaaaaatgaagacattaagacatttccagattaacaaaatctgagagagttcattatcaccagacctgtcctgcaagaaacgctgaagtgagtctttcaggctgaaataaaaggagactagacagtaacttgaagctgtattaagaaataaagatctgagaaatgataaatacatgagcaattaccaaagctagcattattgtaacattggtttacaactccactttttgttttccacaaattaagacactactgcattaaaaaacaattattagtctacgcttttagacacacaatacataaaaatgtaattttatgacatcaataactggaagggagcagggactgaatcttatgagctgaatttttgtatgctattgaaagtaaattggtataaattgaaattgcagtgttataactttagggcattaaatgtgacccccaatggcaaccacacacacacacacacagaaaatagcagaatataaacaaaaggaaataacaaggaaattaaaacacttcaccacaaaatatcaactaaacacaagtgccagtaaggcaggaaatgagggacaaaaaagctgtaaggcatatagaaaataaacagcaaaatggcagcagttaaatccttatcaataattactttaattgtaaatgataaaactcttcaatcaaaaggcagagtttgacagaatgtataagaaaaacacaatctacaagagattgtatatgctgtctacaagagactcatttcagatccaaagacacaaataagggatgtaaaaagacattctatacaagtaataaccaaatgagagtgcaggtagctacattaatattagacaaactaaatcaaaacaaggttgagacaaaaaagatattacacatcaataagtgtcaatatagcaagaagatataataatcaaaaacatttacatgcctaataagagaccacccaattatatgaagcaaaaaattgacagaattgaaggtaaacagacagttctgaaataacagctggacacttcgataccctactctcaataatggacaaaaacacccagtcagaatataggcaagaaaatagaggatctgggccagacaaggtggctaacgcctataatcctagcacttcgggaggccaaggcgggtggatcacttgaagtcaggagttcgagatcatcctggccaacatggcgaaaccctgtctctactaaaaatacaaaaattagctgggcatggtggcatgtgcctgtaatcctacctactggggaggctgagaccaggagaattgctcgaacccaggaggtggatgttgcagtgagccaagatcgcaccactgcactccagcctgggtgacagagcaacactctgttttaaaaaaaaaacagggaaccaaataaagtatcttctatcacaacaggatgccactgaaaatcaataaaatcaataactgaagaaaaagtagaaaattcaccaactgtggaaattaaaaaatacacggttaaacgcagaagaaatcacaagggaacttagaaaatacttagaaataaattaaaacaaaaaaacacaacatgccaaaaattacagaacagcaaaagcagtcctaagagggaaatttgtagttgtacacatttaattgaaaacgatctcaaatcaataatccaacttcaaatcttaaggaactagaaaaagaacaaactaataaacccaaagctagcaggatgaaggaaataacaaagcttagagaggatataaataatagaaaaataacagagaaaaatcaatgaaaccaaaaactggttctttgaaaaaattttaacaattgacccagctttacctgtattaagataaagaagattcaaattactaaaatctgaaataaaagtagggacattagtatcaactgcacagaagtttaaaaaaaagagaagacagtactatgaacaattgtatgccaacaaattagataatatagattaaatggagaaataacgagaagtacaaaatgtactaatactgaatcacacacacaaaaagaaaatctgaatagacctataactagtaacaagactgaatcaataataacaataaaaaaattccagacaaaagccctagatgtgatttttttatctgtgaattctatcaaacatttaaagaacatcgttttttcccaaagttttgccaaaaatggatgaggaaacacttcctaacacattcaatgaggccagcattgccctgatagcaaagtcaaagaaactacaaaagaaaactatagaccagtagcccttaggaacattgatataaagtcctcaacacagaaccaacaaactgaattccacagcttattaaatggattatacacgaagaccaagtaaaatttattcctgggatgcaaaaatggctcaatatatgaaaaacaatatatcatgttaatagaaagaagaaaacaaatcacatggtcatctcaactagcacagaaaaaatatttgaaaaaattcaacaagattttatgataaaaacactcaataaactaagaataaaaagaaattaccacaacataatgaaggccatatataaaaatcccacagtggccaggcatggtggctgactataatcccagcactatgggaggccgaggcaggtgaatcacttgaggccaagagttcgagaccagcttggccaacatggtgaaaccatgtttctactaaaaatacgaaaattagctgggcatagtggtggacacctgtaatcccagctacttgggaggctgaagcaggagaatcacttgaacctggcgggaggaggagggtgcagtgaaccgagatcgcaccactgcactccagcctgggcgacacagcgagactctatctggggggaaaaaaaaaatcccatagctaacatgatagtcaatggcaaagaattgaaagcttttcctataaggtcagaaacaagacaggatgcctgctttcaccacttccattcaacatagtattgaatgtatgagagagcattaagaaaatgaataaaaatcatctcaaattggaaaggaacaagtaaaattatctcatttgcagatgatataatcttatatgcagaaaacctcaaggatttcaaacacaaaaaaagaataaacaaacccgcgaagaagcagggcacaaatttaatgtgcgaagaatcagttgtgtttctataccctaagaatgaacaattaggaaaggaaattaagaaaacagatttataagatcatcagaatgaataaaatacttaggaattaacttaaccaaggaggtaaaatacttgtacactgaaaattacaaaacattgctgaaagaaaagaaagaatacgtaaataaatggaaagacatctggtgttcatggctttaaagacttaatattgttaagatgtcagtactattcaatgcaatctacagactaatacaatccctaccaaaatcccaacaatgtttctggtagaaataaaaaaaaaaatccaggtgggaggaggcgagctcaggaaaaataactaatgggtactaggcttaatacctgggtgatgaaataatctatacaacagaacaccttgacacaaatttacctatgtaataaacctgcacatgcacccctaaacttaaaagttaaaaaaaaaatccatcctaaaactcacaaagggccctgaagggccaaaaccatcttgaaatataagaagttggggccatgcacggtggctcatacctgtaatcgcaacactttgggacactgaggagggcagactgcttgggctcaggagttcgagacccacctgggcaatatggcaaaaccctgtctctacaagaaatacaaaaactagctgagcatggtggtatgtgtctacaatcccagctactcaggaggctgaggtgggaggattgcttgaacctcagatgtggaggttgcagtgagctaagattgtgccactgcactccagcctgggcaacagagccagatgctatttcaaaaaataagtaaataaatacacaagacatatacttcctggtttcaaattttactataaagctacagtactaaaattagggtggtcctgacataaaaaaacaaacatatagtctaacagaatagtcgagagagcccaaaaataaacccttgcatctattgtcaaataattttcaacaagagtgccaagactattcaatggggaaaaagacactcttttcaacaaataatgctgggaaaactagatattcacatccaaaagtgtgaagctggactcttacataacattatatacaaaatttaactcaaaatggatcaaacacctaaatgtgagagctaaaactataaaaaccttcaggagaaaacatgggggaaagtttcatggtatgaatttggcaattatttcttgaatgtgacaccaaaggtacaggcaacaaaagaaaacagacaagttggattttttcaagctaaatagctcctgcacagcaaaggaaacaatcaacagagtgaaaaagtaacccattctttatgggagaaaatatttgcaaataacatatccaataagggattaatattcagagaatacaaagaacttctttttctttttttttgagacagagtctcgctctgtcacccaggctgagtgcagtggcacaatctcagctcactgcaacccccccaccttccgggttcaagcaagtctcctgcctcagcctccccaacagctgggactacaggtgtgcaccatcacgcccgaccacaccagctaatttttgtatttttagtagagatggggtttcactataccagccagtctggtcttgaactcctaacctcgtgatccacctgcctcggcctcccaaaggcacgagccaccgtgcccagccagagtatacaaagaacttctaaaacacaatttaaaaatcccaaactactcaattcataaatgggcaaaaggcttcaagagacatcattgctccaaagctgatatacaaatgaccaaataagcatgtgcaaatgttcaatatcgctgatcattaggaaaatgcaaattaaaaccacaatgagacttcacacccattaggatggctattattaaaaaaaaacataaacaaaacaacacgatggtgaggatgtggcaaattcggaaccctagtgtattgctggtggtaatgtaaaattgggcagccagtatatcaaacagtatggtggtttctcaaaaatttaaatatagaattaccattcaatccagcaatctcacttttgggtacatatccaaaagaaatgaaagcagatactcaaacaggtattacatacccatattcatagcagcattattcacaacagccaaaagtgtctattgatgaataaatggataaacaaaatatggtatatacataacaatggaatattattcggccttttaaaaggaaggaaatgctaacaactgctacaacatggatgaacctcgaagatagttagtgaaataagccagttacaaaaagatatcacgtgattccgcttatacgaggtacctagaatagtcaaatacatagagatgaaagtagaacaatggttggtactaacaggaggagcaatgaggagttattatttaatgggtgtggtatgtcagtgtgggataatgaaaaagttctagagatggacagtggtgacaattgcacaacaatgtaaatgtactgaatgctagatgttaatgctactgaactgtatgttttatatatatatatcatatatatcatatatatatcatatatatctcatatatatgagatatatctcatatatatatatacacacgcacacacatacacatatatataaaatatattatcacagtaacaaaattactcatctctggccctatttatcttcaaacctttattcctgcttctccccagatgcaatcaccctcaactactcggattctttttcctcctatttaattaggtattttaaaatattattcttaatactgcttcttacagatttattaactacagatgtcctgccatggtaaaggagacttacaaaactagcagtattccatacgtgtttcacttatcttaattcccctaaaatagcaacatcacaattttgggttaactcaaaccaccaatgctaataattgtttcctttttctaatttgctcagttttgcaagaatccattacatttttctccaaatatttcaacatccatctatcaatttgattattttcccggaagttctaatctcctgctccaagcaaaactggtaacttttcagcttgtgtcacagctgtcatcctgggactttcttctttgttgcttctgagtgggattctctgtttactgaagctcttttatttcctttcttggtttattcccttgttttgttgaaccacatcttctgggtaatgtccaaaaaaaatgttcttcatgagcacatttttttagtccttgagtttttccccctactttcacacttgattgatggtttaactggatacagaattctaggctgaatgcagaactttcaaggtgatgttttaccaccttctaccttcaattctactgccaacaagttagatgctattcatattcctaatccctcctaggcgattctaaaaagtttttagatattatctttatttctggtgtcctaaaacaaatttcataataatttgcctagtatagggtttcttttattgtgcttggcactatgtaggtcttttcaatctggatgtttctctcctttgttttctctttatgaatcctgttaattagagacaagatctctacaatgatcctatagcacattttaattgataaaattaacatataacactacaatattgtctaaagcagtctgtacatatacaaataatgtaataactaacatatataggtctaactactaattctatgagttatacagaatcaaagttacaatctcaaaaacagatgagaaatgacaatgaataatctgttcattgacagagacaggtcggacattacacagctccagctgatttttgtcacgcaggaatgtcagccaagtgttggaagatccttcgaaatttcaaaagcagctagaaatatagctttttatgtgaggtctcaatttttaaatataggtaatgtatttcaattttaaacatggtatgaatcaacagtgtgaggtcaaataaagaatattaacaagattagcccaagagttgtacacaagataatatggttcctaaggaaacaacttcggaatctgacagaccagaactcaaccttcagtctcactacttactaaaagtaatgcttggggaagttaacttcttttaaaccatctatgaaatggggatagatttactgtagagatttagtaagattatatacataaactggctatacaacagttacacatgcaaataagtatgtaaataaatgcccaataaatatctcctattattaacatacaaaaaaatgcattggtgtagataatataaacactgtcaaatccactaaggaattaagactaatgaaagaagtaggaggtggccagaacggtggctcacgcctataatcccagcactttgggaggccaaggcaggcagattacctaaggtcaggagttcaaggctagcctggccaacatggtgaaaccacgtttctactaaaaatacaaaaattagccaggcatgtggcgcgtgcctgtagtcccagctacgggaggctgaggcaggagaattgcttgaactcgggaggcagaggttgcaatgagatgagatcgccccattgcactacaacctgggaaacaaaccaagaccccgtctcaagatttaaaaaaaaaaaaaaaaaaaaaagcaagaggcacccaataagaacagggctttcttttggggtgataaaatgttttgaaacttgataaaggtagaggtaacactgtgaaggtaataaatgccacggaatgtacactttccgtggttaaaatggttagctgttatgtgaatttcactttattaaagaaaaaatgtgggaaaaacgaggtaatatgagagaaggagtcagaatatgctagaaacagagaatgaaactgatcattctttcctcttttgaagcctgcctataaataacatctctttaactccttttttaaactgaatagccaatactgatgttagggcaacaaatacttcctttttattgaaaatcaacatacaactaaggttgaaagactgagagatcaacatatttcaaatatttcaaaagaatatttgagactgggagtggaggctcacgcctgtaatcccagcactttgggaggctgagacaggtggactgcttgagttcaggagttcgagaccagcctggaaaacatggcgaaactctgcctctactaaaaatagaaaaattagccatgtacggtgacacacgcctgtggtcccagctacttgagaggatgaggtgggaggatcgctggagcccagaagtcgaggtgaaccatgatcacagcaccaccgtactccagcctgagtgaccgagcgagactctgtctcaaaaaaaaaggggcgagggggtgctcttgaatctattacacagctgcttatacatgggggaaaaagctcacagtgaacaagacaataaataaatctttttcaaaaatcactatatatcagaagactgtactctaaaagcatttccttataatataggactcatgccaccaacaaagaaaagaaaaaggaggtagagggaaagggaaagaacagaaaaggaaaagaaaagcatcatactagaatctcactcttgggagatttacaatgcatagtggcatattaaaggttctgcagtgagaaagacagttcacctctattaaacctccattctcctgatttataagaaacaaacaattcttaagttatgcctcttaaacacatgaagcaccaattttgttaaagactgcctagatttacaccaaataacataaattgaaaaacttcagtatcagcttgagggatgagattaacatacatattggccgggtgcagtggctcatgcctgtaatcccagcactttgggaggctgaggcaggcggatcgcttgagcgcaggagtttgagaccagcctgggaaacacagcgaaaccctatctctacaaaaaacacaaaaattagccaggcctggtgatgcgtggctgtggtcccagcaacttgggaggctgaggtgggaggatcacttgagcccagaaggcagaggttgcagtgagccgtgatcatgcctctgcaccccagcctgggtgacagagcaagaaactgccttaaaaaaaaaaaaaaaaaaaaaaaggtggcattccaagatggtcaaataggaacagctcctgtctgcagctcccagcatgatccacgcggaagacaggtgatttctgcatttccaactgaggtacctggttcttctcactgggactggttggaaagtgggtgcagcccacggagggtgagctgaagcagggcggggcattgcctcacccaggaagcacaaggggtcgggggatgtccctttccaagccaagggaagctgtgacacactataccgggaaaattgggacactgccacccaaatactgcgcttttccaacggtcttagcaaatggcacaacaggagattatatcccgtgcctggctcagcaggtcctacgcccacagagccttgctcactgctagcgtagcagttccaaattgaacttcaaggcagcagcctggctgggggaggggcgtccatcattgctgaggcttgagtaggtaaagtggttgggaagctccaactgggtggagcccaccacagctcaaggaggcctgcctgcctctgtagactccacctctggaggcagggcatagctgaacaaaaggcagcagaaacttcctcagacttaaacatccctctctgacagctctgaagagagcagtagttctaccagcacagtgtttgagctctgagaacggacagactgcctcctcaagtgggtccctgacccccttgtagcctaactgggagacacctcccagtaggggccgactgacacctcatacagccgggtgcccccaagacgaagcttccagaggaaggctccggcagcaatatttgctgttctgcaatatttgctgttctgcagcctccactggtgatatccagacagtgtctggagtggacctccagcaaactccaacagacctacagctgagggacctgactgttagaaggaaaactaacaaacagaaaggaatagcatcaacattaacaaaaaggacatccacaccaaaaccccatctgtaggtcaccataatcaaagaccaaaggtagataaaaccacaaagatggggagaaaacagagcagaaaagctgaaaattctaaaacccagagtgcctcttctcctccaaaggatcacagctcctcaccagcaatggaacaaagctggatgaagaatgactttgacgagttgacagaagtaggcttcagaaggtcagtagtaacaaacttctccgagctaaaggaggatgttcaaacccatcgcaaggaagctaaaaatcttgaaaaaagattagacaaatggctaactagaataaacagtgtacagaagaccataaatgacctgatggagctgaaaatcatggctcgagaactacatgacgcatgcacaagcttcagcagccgattcgatcaagtggaagaaagggtatcagtaattgcagatcaaatgaatgaaatgaagcaagaagagaagtttagagaaaaaacagtaaaaagaaatgaacaaagcctccaagaaatatgggactatgtgaaaagaccaaatctacgtttgattggtgtacttgacagtgacggggagaatggaaccaagctggaaaacactcttcaggatattatccaggagaacttccccaacatagcaaggcacgccaacattcaaattcagggaatacagagaccaccacaaagatactcctagagaagagcaaccccaagacacataattgttagattcaccaaggtggaaatgcaggaaaaaatgtaaagggcagccagagagaaaggtcgggttacccacaaagggaagcccatcagactaacagcagatctctccgctgaaactctacaagccagaagagagtgggggccaatagtctacattcttaaagaaaagaattttcaacccagaatttcatatccagccaaactaagcttcataagggaaggagaaataaaaacctttacagacaagcaaatgctgagagattttgtcactaccaggcctgccttacaagagctcctgaaggaagcactaaacatggaaaggaacaactggtatcagccactgcaaaaacatgccaaattgtaaagaccattgatgctaggaagaaactacatcaactaatgggcaaaataaccagctaacatcacaatgacaggatcaaattcacacataacaatattaaccttaaatgtaaatggggtaaatgccccaattaaaagacaaagactggcaaattggataaagagtcaagacccatcagtgtgctgtattcaggagatgtatctcacatgcagacacacacacaggctcaaaataaagggatggaggaagatctaccaagcaaatggaaagcaagaaaaagcaggggttgcaatcctagtctctaataaaacaaactgtaaaccaacaaagatcaaaagagacaaagaagggcattacataatggtaaagggatcaattcaacaagaagagctaactatcctaaatatatatacacccaatacaggagcacctagattcataaagcaagtcctgagtgacctacaaagagacttagactcccacacagttaatatcgggagattttaacaccccactgtcaatatgagacagatcaacgagacagaaggttaacaaggatatccaggatttgaactcagctctgcaccaagcagacctaatagacatctacagaactctccatcccaaatcaacagaatatacattcttatcagcaccacatcacacttattccaaaattgaccacatagttggaagtaaagcactcactcctcagcaaatgtaaaagaataaaaatcacaacaaactgtctctcagaccacagtaaaatcaaattagaactcaggattaagaaactcactcaaaactgcacaactacatggaaactgatcaacctgctcctgaatgactactgggtaaataacaaaatgaaggcagaaataaagatgttctttgaaaccaatgagaacaaagacacaacgtaccagaatctctgggacacatttaaagcagtgtatacagggaaatttatagcactaaatgcccacaagagaaagcaggaaagatctaaaatcaacaccctaatatcacaattaaaacaactagagatgcaagagcaaacaaattcaaaagctagcagaaggcaagaaataactaagatcagagcagaattgaaggagataggacacaaaaaacccttcaaaaaaaaaatcaatgaatccaggagctggtttttttaaaaaacaaaattgatagactgctagcaagactaataaggaagaaaagagagaagaatcaaatagatgcaataaaaaatgataaaggggatatcaccactgatcccacagaaatacaaactaccatcagagaatactataaacacctctatgcaaataaactagaaaatctagaagaaatggataaattcctggacatatacaccctcccaagactaaaccaggaagaagttgaatccctgaatagaccagtaacaggctctgaaattgaggcaataattaatagcctaccaaccgaaaaaagtccaggaccagacagattcacagccgaattctaccagaggtaaaaagacgagctggtaccattccttctgaaactattccaattcatagaaaaagagggaatcctccctaactcattttaggaggccagcaccatcccgataccaaagcctggcagagacacaacaaaaaaagagaattttagaccaacacccctgatgaacatcaatgcaaaaatcctcaataaaatattggcaaaccgaatccagcagcacatcaaaaagcttatccaccaagatcaagttggcttcatccctgtgatgcaaggctggttcaacatacgcaaatcaataaacataatccatcacataaagagaaccaaagacaaaaaaccacatgattatctcaatagatgcagaaaaggcctttgacaaaattcaacagcccttcatgctaaaaactctcaataaattaggtattgatggaacgtatctcaaaataataagagctatttatgacaaacccacagccagtatcatactgaatgggcaaaaactggaagcattccctttgaaaactggcacaagacagggacgccctctctcaccactcctattcaacacagtgttggaagttctggccagggcaatcaggcaagagaaagaaataaagggtattcaattaggaaaagaggaagtcaaattgtccctgtttgcagatgacatgattgtatatttagaaagccccactgtctcagcccaaaatctccttcagctgataagcaacttcagcaaagtctcaggatacaaaatcaatgtgcaaaaatcacaagcattcttatacaccaataacagacagacagagagccaaatcatgagtgaactcccactcacaactgctacaaagagaataaaatacctaggaatccaacttacaagggatgtgaaggacctgttcaagaactacaaaccactgctcaacgaaataaaagatgacacaaacaaatggaagaacattccatgctcatgggtaggaagaatcaatatcgtgaaaatggccacactgcccaaggtaatttatagaaacaatgccatccccatcaagctaccaataaatttcttcacagaattggaaaaaactactttaaagttcatatggagccaaaaaagagcccgcactgccaagacaatcctaagcagaaagaaaaaagctggaggcatcacactacctgacttcaaactatactacaaggctacagtaaccaaaacagcatggtactggtaccaaaacagagatatagaccaatggaacagaacagagccctcagaaataacatgacacatctacaaccatctgatctttgacaaacctgacaaaaacaggaaatggggaaagggttccctagttaataaatggtgctgggaaaactggctagtcatatgtagaaagctgaaattggatcatttccttacaccttatacaaaaattaattcaagatggattaaagacttaaatgttaaagacttaaatgtagacctaaaaccataaaaaccctagaagcaaacctaggcaataccattcaggacataggcatgggcaaggacttcatgactaaaacaccaaaagcaatggcaacaaaagccaaaatagtcaaatgggatctaattaaactaaagagcttctgcacagcaaaagaaactaccatcagagtggacaggcaacctatagaatggaagaaaatttctgcaatctacccatctgacaaatggctaatatccagaatctacaaagaacttaaacaaatttacaggaaaaaaatcaaacaaccccatcaaaaagtgggcaaaggatatgaacagacactttccaaaagaagacatttatagacatttatgcagccaacagacacatgaaaaaatgctcatcatcactggccatcagagaaatgcaaatcaaaaccacaatgagataccatctcacaccagttagaatggcgatcattaaaaagtcaggaaacaacaggtgctggagaggatgtggaggaacaggaacatttttacactgttggtgggactgtaaactagttcaaccattgtggaagacagtgtggcaattcctcagggatctagaactagaaataccatttgacccagcaattccattactgggtatatatccaaaggattataaatcatgctactataaagacacatgcatacgtatgtttactgcagcactattcacaatagcaaagaattagaaccaacccaaatgtccatcaatgactgactggattaagaaaatgtggcacatatacaccacggagtagtatgcagccataaaaaaggatgagcttcacgtcctttgtagggacatagatgaagctggaaaccatcattctgagcaaactatcgcaaggacagaaaaccaaacaccgcatgttctcactcacaggtggcaactgaacaacgagaacacttggacacagggcggggaacatcacacaccggggcctgtcctggggtggggggttgggagagggataacattaggagaaatacctaatgtaaatgacgagttaatgggtgcagcaaaccaacacggcacatgtatacatatgtaacgaatctgtaagttgtgcatatgtaccctattacttaaagtgtaataaaaaagattaacatacatattacagaataatcaattatctgaataaaacactgtttcatattaccagcatgtcaggacaagagcttagcagcaagaaaggaggaaaacagcagtagtaagaggaaaagaagaaaaaaacaatttgggaatagttagcttctatgagatgtggctttcttactgtcaattccaaatgctatatatataagccaaactgttgcaatcaagatagtaaaaaacagcaacaataacaacaacaataaaaaagagtaaaaaaattacagcttggttcacttttccctcactttcttttggcttattttttacattaattcccaatcgtaggcggtaacctcaaaaggagaagttaaatatttgtctcaaaaggactctgagtacctcaagtataaaacttcgcattccataacaaatcatatccctcaaagttaaataatactgatcaatttagccaggcgtggcggctcacacctgtaattccagaggccgagacagatggatcacccgaggtcaggagtttgagaccagactggccaacaaggtaaaaccccatctctactacaaatacaaaaatcagctgggcgtgggggcgggcatctataatcccagctgctccgcaggctgaggcaggagaatcgcttgaacccaggaggcagaggttgcagtgagctgagatggcaccactgcactccagcctgggcgacaagagtgagactccgtctcaaaaaaaaaaaaaaaaaaaaatactgagcaatgtaagcttgaaggtatttgcaatctgagtttattttagtcaaagcaatgatgtagtacaacaataacaaagtctaatctctgcagagtattttccgtttggggaaaaatcacaggaaaaatatgcagtataagagaaaaggaaaattttaaatattctttgggcattctaatagagagggcaaacaaaaatccaactgaaaatactttcgttaacagaaaaattaagtatacaaaaattttaaaaacatttttcactgtgacactatcatctttgaaccaaaaaaggaatcactactgattactaatatcctcaatataatgtgaaccaatcaaggaaattaatcacttaggtactaggcacagccattctcttggagactttaatcctaacaggcaaattacttaggaattatttatttccattttagttgatagaaaaaaacaatacctttatttctggtcactgttcatcctttctctcataaaagaagaggaggggcctgggcaatagaggctatcaaagctttattggccaattatcccccaatcaaaaaagaatgagacaaaaggaaacaaggacagcatagctattatattcagcagataattcttcatgttgacatgctattaatagtatcataagaggtgacaagatccatcggctaaaagaaccactggctaaatattaatcgggatacataaaacatttttttttaagaaatggcatatttgaagaaatcatatggctagacaaaacaaactagatagattgtgaagctagatagactaaacctcagtcttgattactaattacaagctgaatgtataaatcttttccttcagaggcataaaggtaagagttatgaatcaaatggaaggaccaaaatgcttcccaatgaagtattttcttggtgaagttattgcaatctaaggtctgaaaatcagctgtacaggaactttatcagtaacctaaaagatgatcaatcagcctcagtgactaacgacactgagaagagaccaacgtaaaaactagcacaccagattaatttaccacaaagatattctcaccataatcagaaaacctgccctctattcagagtattcactcttttttggtatgagtactaatctggctgggttgaattagtgcttagttgaatacagaattaaaataatgtgaagtaggtcatcttgtgggatatatcatgcaggccataaagagacccaataaacacttctgtaccataggagaggatacacgtctggtgactgtactgctcacttcccagattcaccatcttccttaattcaaaatgtatctttttcttttttctatggctcattgctttttctttagaagtgttatcacaagctatatcaacctgctgttcccatcagcttgcaatgttaagcatccttctactgtgccctgcctaactatgagaagataaattcatttctctattttcagcttcttaaacagtccttctggcatccctatgtaccagctataattttaatagaaactataaaaactagggggattttttgtagtttttgtaggtacaaaaatttgattttcaatataaatattacaaaattctaaatgaacacaactcaatactacagaaaattgtaaatctaccgtggttcaaagcaagttgctaaaacttatggctagctcatgaagaatgtaggttgtcttatatacttacacaactattataaaaggagtctacatctgcataatgctttataagttacaaagtactttcccatccattttaacatctaattgtcataagcaccaagtatttaaattgaaagtctccaggaaagatactaatgaaagagtgtaaaggaaataatccacaacttaaactttttttttaagagatgggttctcgctgtgttacccagactggcctctaccctctacctgggggttcaagccaagtgatcctcccacctcagcctcccaagtagctgggactacaggagcacaccacaatgcttgacctgaaattttaacttttaaagccattaaggttcttactgacaatttacagttgatttattaatacacatatatttttgctctgaaattagcaaatatgttaagactatttgcacatcagacatgaattcctttcataaaatacgccacgaattcttaaggttcctactgacaatttacagttaatttattcatacatatatatttttgctctgaaattagaaaatatgttaagactatttgcacatcagacatgaattcctcctttcataaaatatgccatgaattcttaagactgtatattttaaaaataatatttacatgggccttgagaaataaattgttctaaactaaatgataatcgcagttagaaaattatgcaaaattataaaactgattagccttggtacacccagcgattcctttctatatctcttgtaccaaccaaatacttcttcaggtagttggtatacatatgcacagtggtaccttaaaatttggtctacataaaaatatacagtattagtcatctacatcttagtgtgaataaatttaactgaataaatccactctaggattttaagcctaatccccaactatgaaataagacaaaaatcacactgtaatggaatccaggtattaaacctggtgaccagcattttatggagtccaggaaatgatatcacataagtacctgattatgtaatgtataaggtcagttcttatcaaatgaactgtatccccctgaagtccattaggtacggtaagccaaaaaatgattatagagcactacaataatagtttacatcacaaagtatctttttctgtggcttagaaatcttttctaaatgaaaacacaacatgaatataaacatcaatatttgaaatagaaaatcaaagcattcttaccttactacatcatcaatattgttcctgtatacgccttcaagtctttctgcaggaaatcccatagcaataatgtttggataaatatctgagtactttagttaaggaaagaaatatctgaaatatgcagcaatcaaactaaaagaatactttttaaaacattagctagttatgaaaagaaagttttccccactatagctggagtaataaaaggtggtcaatgtatttatgtataaccatttatgtgttaatactggtaaagataaaaggtaacttccacatggacagtattcaggtatatgagaaaaacagaaactcacggtttatacatcacagaactaaagtactttatgtcaaaaaccaaaaatcaaaacaaaaccccaaaattgacacctgcctgaaaagacaagagttcaacttctaatttttcatggctaaaaaaggcaacacgttacagaaaaaagaagacacagtgaaaatctggaagtcagatttaagagctggctatgtctctaactagttgtgtaatttggacaagtcacttaacctttctagaccgcaatttcctattctacatgataattagactcaaagagattactactaaggtttcttccagcccttgctatctatgacttgataatactgaactgaggcagaaacttcatttattattactttcaatcaaactacagttggccaatgaacaaaaccggtttgagctgtgtcggaccacttgtatgtggaccttcttctacctctgccacccatgagacagcaagtctgacctttcctctctctcctactcctcggcctactcaaagtgaaggcagtgaggatgaagacctttatgaggatccacttccacttaatgaatagtaagtatattttctcttctttatgattttaatatttttcctgcagcttactttattatacaaatatgctatctgacacatatataaaatatgtattaacgaacattatgtcatcagtaagacttctagtcaagtataggctaaatattaagttttggggagtcaaaagttacatgtgaattttcaactgcacaggggtaggcgcccctaccctctgtgttgttcaagggtcaactgtcatggatatttagcatgcccattatagtgaattatgttacagactatagctagcataaaaacaaaactctacacacaagaaccatttataaactataaaaatcatcaacactctacgcttttatgattcttacccactcatcataccagctctcattttttgaggtacctcaatctaatctcatgattttctgacagacctttcacaccagcccagtcaatctgcctaacgcctcatttcaagaccaactccaataatctctgcccactcacttctggactcatttatcttccaaataaaattcaaagttgacctaatccaatgccctttttctaggtctttttctttctgcagctttcacatgattgagttgatttcagtagtattttcaatccaaaaataattatcaagttactgaaagctattattttaatagcatagtttaagaaaaggttatatgtatatgttctatctataagataactatgtgctaactggagagatctactgaatattttaaggaaaaaaacccacccaatagagtatactgggtatatctttcgtatagggatgacaaaaagaatgttaacccatatatttgcttgaatgtcaacatcctcaataaacatatgcatgcatgagtgataaacaagaaactaataaaaatggctgcttcacagagaaagggaagaaaaggggaaaagcatagcaagaacaggtagcagcaggactcctgtgtatatctttatatatttttgatcttagaataatataaagaaaaaaaagacttataatctaataaattgaacactgctagaaacaaaactgattaaatgtcaaattggcacccaggagaaagagaaaggttttgttacaagggctatttggacactgcacttttactgcacttcttggtaggaagtattctaagaacaaaaaaacactaggaagaaactttaaacttcttttggtagttttactgattctagtaatatcattattgatatcctcaaactattttcttttttttttttttttaaatagagaccaggtctcatgatgtggcacaggctggtctcaaactcctgggctcaagccatcctcccaccttgacctcccaaagtgccaggatgacatgcatgagccactacatccagcctcctcaaactattttatcttttttttccccctgaaacagggtctcactttgtcacccaggctggagtgtggtggcatgatcatggctcactagagccttgacctcctgggctcaggtgatcctcccacctcagcctcctgagtagctgggaatacaagcacatgccaccatgcccagctaattttttgtaaagacaaggtttcatcatgttgcccaggttggtcttgaactcctgagctcaagcaatccacctgcctcaatctcccaaagtgctgggattacagtgtgagccaccgcaccaggactattttctttatgttgtagaaataagcaaagaagttatgctaatgactttaaggttcataattttaagttaagaaagcagataatattgtaaaatcaagaaatcatgtaaaaaactaaaaatatcagtatgaattcatgtttgtaaaaatctgttttctaggtcttttctctgaaatggcctaaaagcaacatcactctagcagtaataaacattcctagaacacagattttcatctctaatatcataataaactaaaaggtaccaaactccttggaaaaagacttaatgccaggtctggagtagggaaggtacaggtgagcctaggataccttttcattccaagagaaggaggaaggcttatagagattaatggcctatatcaaatggacataggaggtggtataaaggtccaaatgactagctgtgataatctgagcatcaaagaaaacatttaaatggtactaacaccctgaattaaataaaagtccttgagtctataaagacactcaaaagaaaaaagttaaggccggatattgttggtcacgtctgtaatcctagcactttgggaggctgagatgggtggattccttcagcccaggagtttgaggctaggctgggcaatatggcaaaaccccatctctacaaaaaatacaaaaaaattggctggccatggtggtgtacacctttagtcccaggctgaggtgggagaatcatctgagcccagggagactgaggcttcggtgtaccatgattgcaccacagcacaccagcctgggcaacagagtaagaccccatctcaaaaaaaaaaaaaaagttgaaacaactaaaaataccctttttatttatcatcttttgaggtggttaacggaatagttcttcactttgaaaaatggtaaagagtgagatttaagtatttattttgtctttcctatagagactgtatttaaagacaaacaaatagtcccatttcacaagttctaccttatcaaaaaacatcaattaataatgtaaaacaatagaatttaaagtcttattttgcaaaccctgatgaaattactgatatactcaaagatcaacaaatggtgttaaaccaataggtgagtggttgatgagaaaatgaactttcttacagcaccaaaatactactacccaaaatactttctaatgtaaagagacgaatataattgaacaatgggcagaaaagactgtcactgtccaatttcagtggccatctcctcatcatgaatcaagtaaagatcatgtaacttctgacatgcaatataaaggacacagcatcatctatgatggttaaggatcttcaactcaaatccaccaaggattcagatacaaattttaatttgcaggaaatacataggataaaacaagctaaatgacactatgagacagcaaactggacaaattcagacagtttgtaggacatgacccattctctcttcaacaagccagtatctttaagaaaaaaaaaaggtgggggggtggtgggaggtgggggaagcgggaggatgggttgctgcccttgatttttaaagatacaagattcctaacagccaatttcataggtgcaatgctggcctggatactgttttagccaaaccagccataaaggacatttttgagctaattggaaacattttaatgtgatccgggcattacacaagatgaaaagttactgagatggaaaagtagatgtaaatgactaaaaaaggcaggtttcaaaacagaatgtacaatgtaataccatttggataaaaagaatacgtatatatccatatagacatatatagacaaaagattataaagtactaaaagtcatatataggtggtggcatgtatattttttctcatatttgcttgttttgtatcttctatttttgccacaatgtacctgtatcgtttctgtaacaaattgcttaaaattagatgttttataattatctatttactaattgccatgacaaaatgctgtcttgccctgtatgtagaaaaagctctgtatgcattttttaatgccaaatttctaccaaaaaattatactaataaaagcatctaagatttaaattactatgccccaagaacattttttgtcactttaggaacatacaaattcaccctcagcctcaaagggtttttattataaagattctaaaagaaaactattaggattatcattttaacatcacaaatatttgctgtcatctactactctcacataagaaagctgccccaactcttagccaatctgacattttttttaaaaactgagaaaaataaatttaaaaaattagaagaaagtagcctcacttaaaaatgtagctgttgttcaattatcaaaatgtattgggatattatatccattcattttaaaaaaaaaagcagaagacagcagaggcctaaagtgaaataatcttaactgagtaatcttaactccaccttagaagacaaatgtaagaaaatggaagacgtcagaaaaaatgaggcaccagaagcaatggcagggaacccaaagtggttatagctaccaatactctggaattcctactcaaaattataaatatattttggccaaaaaatataaattcaaatcatctatgttttttgaacaacgcaactaagaatattttattaaaagaaataattattagcactaacaaccttacctaacctaaaccattaatttcagtgagaatagtattaagatttttatccttacagatatgcacagaagtacaaagcccctcccttgaaatgtggtcattctaaccagggctaaacttgaatttatccttgcactataaatactaattaataattagtatttaatgccagcctgggggaacttcaggctgatgtctattttctgctgctatacaataccacagacggggtaatttataaagaaaagaagtttatttcactcacagttctagaagctgagaagtctaagatcaaggggctgcatgtggtgagagtcttctggatgcatcataacatggtagaaggcatcacatggcaaaagagggcatgagcacatgatagagaaaaagggggccaaactccagagataactaacccacacctgcaataatggcattaatccattaatgaaggcaaagcccttataatgtaaccacttctgaaaggttccacctcataataatgccacatggcaatgaagtttcaacatgagttttgaaggaaacaaccaaaccatagcattctgcccctgggcctcaaaactcatgtccttctcacctacaaaatacattcgtttcatcccaatagaccctgggaagccccacctccatggctttgctgtacttagcccatgcagctttcacaggttagggtctcaagcctgaagttctcccaggctggcactgtatacttgtagctctacagttctgaagctttggtggtgggcctgctgccatggctccattatgcaatgccctagtagggactctctgtagtgactccaacccacatttccacccttcagaggctccaagcctgtggcaagtctctcccagactatccccatcatcctttgaaatcctggtggtggtagccatgtctcccacagctctttcatcctgtgagcctgcagaattagcaccatatagacgctgccaaggtttaccatttgagtactcagcagtagcctaagccacacctgggcccctctgaaccagacctaggacagccaaggcccactgggttgaaatatggggagctgaggtagccctgggcagcaagcttgtgaaggaccacctgagccacaaaccattctgccctcctagagctctgggcctgtgatggggcaggcagcctcaaagatctccaaaatgcctctggggtctttttccactgtcttgataaatagcccttgggtctcctctaggaatattaatctcttcagcaaatggttcctggaccacacccttggtttgctctcctaaacataccttttgcattctttactatggccaggctgcaaattttccaagtatttccattctgcctctcttttaattataaattctgtcttcaagtcattcccttcccccagcttagtttaagtggttaaaagtagccatccagtaacctaaatgctctgctgctgagttatttcttctgcagcatatcctagttcatcactcttaaattctgcattccataaagtcttaggatatgaacataatttcgccaagttctttgcaactatttaacaaggatggcctttactccagtgtccagtatcttgttcttcatttctgagatatcatcagaaagacctttaccacttatagttctaccaactgatgacaactctctaagaagttccagattttccctacagctctcttcttctgaatcctcatcagaattgtccttaatgctctattctcagcaatacaggctttttctagcctgttcatccaaactcttccatccttctctagccagaacccaagccatttgaacattttcaggtatttgttatggcaacaatcacactcttggtaccagttttcttagtaaattttatgttgctttactagaataccacaaaacaggtagtttagaatgaacagaaatgtatttggctcacggttctggagactgggaagtccaagagcatggcatcagcatctggcaaggatctttgtgttgagttaccacatggcagaaggtaaggaagcatgtgagacggaggaggccaaactcccaagataactcatccactaccattcaaacagcattaatccattcataaggatagagataccattatctaatcacctcttaaaggttccatctcttaataccattacaatggcaattaaatttcaacatgagttttgtaagagacattcaaagcatagcagcaaacgttgcaaaggatttaactcatttcagacaagtctataactatacataaatgggtgttacataatcattaaagtaaattcagctggccccctccttcattcacataatcattcaaacatatattgaacgttttgcacaaggggcactgagaatataaggctaagtaagcaaagactactgtcctcaaggctttcctattctattagggaagacagacacacagacctataattgtgccaaagacccgattagataaaaaataagatagcttaagagttaaagagggaaggattaattctgtggggacacagataaaccttcaccaagtaggtaatatattagataatccttaagagttaagtcagaaaccagtaaacagaggaagaaacaagagcagttagaacattccaagcaaaggctaaagtagacatatggaaatacataaaataatcagcaaaaagcaaacagtccagtgaagcttacacacaaagcaacatggagaaggcaggactgacaaagtaaggtccagctttaaggatgccacggcagcgaattcaatttaatcagacagataaggagtcaaagaccaggatcaacatggaagactttgcagagcagcaagtcttgttcgtgagctatttactcctttaaatggagtccaggaattcaatctttttaaggtttcattttcttcagattctcaccttccttactgataaagtttgagatgttacccaagacatcggcatccatcctaagttagaaagatgtagacaactagtacctgttaagtatcatgtaccagacagtatgccaaatatattctcatttaatcctaacaatcctaaatagtattacatttcatagacaaagaaattgagagtcaaaaagactgggtaatttgcccaagttagtaactagtaagttataatttgaacccagattatatacgaagctccaaagcccaagcttttgacaccatactgcccaacgagaggaaattaaggtttttctatttccaaataaaaatataaaactttcaaaggaaacaggttcaaataagtgatttactaacctgtaattacatttactaataaaatgtaaaaattgaaaaaattccaagacagtatgaaaatttactgacatttccaaaagtaatgccagcaactacctaaacaagcaccaaatcttgaggcaaatatttcttatgccacaaattacacaaataaacaaaatctttctaatatacatttatacttctccatatattataaaatttgacattttagaaaaactaaacaacataagaactgaggaatatatatacatataatgatttctgatagaaaacagccttaacctacacttacctgatattcttctgaataagttgagtgtttaatacgaaatttacatataatgacataagtattaagcataaagatttataacaaccaggtaaccagaggaagatgagtatttctgacatctagagatctacttgcaggcactacggcataatggttaataacatacactctagaaccaacttgctagaattggaaccccagcttaacttattgtgcaaccttaggcaaaatacatactctttctgttgcttcctaagcagaatggggctaataaaggtacctatcatataaggttgctatgaggattaaatgagctaatatatgaacaatgcttaaaacatagtgatagctgtctctcaactgaacaaatggtaatgccttatcccataagaccccactgtaactacttttctttcaacgacagtgacttgtggaataatctaaactttctaaagaacatcaaagcttaacaaaaagttttactctttgaaatccttaatgtatcaatttgccttttaagtatttactttattataacttaagaacatatctaaaatacaatcccaaaagaaaaaaacagtgtctctgttttagatttgggaacactaaattttcagtatgtgtttgcttatttgtattttctaatatttctatgatgattacaaattactcatgtgattttaaaaatgccatatgctagcacaggtatgtatcccttatgatgaatgtcatctttttattttatcaaatatgaatttatagttagctattattcttgggttaataaactaacatttatttttaaaatagagcttatgacttttactattttaaaagtaaacatggccaatataggaaatgagagagataaatataaaagatactaatacaaatctagtgttcaatggtaatatctattaaacttcttagatttctatttctttataactaatttttgatggaaataaaaatgttggttacatagtgattactgtattataaatacaatatatcccattacatttttcaaaaatttattatattttcctgatacgaaacttgggaatacaattttaaatgacaatataacattatattgatgggtgtaccatggttaatgaaccattttactactattggacatttaactagttcacaatttttaggtattatgactaacattgcaacaaacacctctatgtttatgtctttttaatgttagtggtcatttatttaggaatcaggctacctgtgttcaaatcccagttctaatactttggccatgggcaagtcacttagcctctctaaacatcactttccccatctttaaatgggaataattctagtatgaactacatagggttgttgtgttgaggattaaatgagtccaaagtatataaggcacataataagcactcaatatatactagcgataaaatatctcctgaattattaaaaagttctttttctcataatatcagtgattactgtatatacaataagaaaggtaaaagaaatgcatacatggtactagctatcttgcctaagttggatggtcaccccagctccaacagatctcagatatattagacagtttccccccacctttgtgtaaacatgctaaatttgttttaattgaggtataattcaaataaaacaaaatacacagatcttaagtgattagtttgttttgactggtaaactgcatatgccatgtttggacagtcttgatttaggtgttacaagaatcctttctcaccaaagaacaaataccgtcccaaagaaaaaatgtaattaatagcaattaagttctaaagtctgtccacaaaaatcaatttaatccataatataactaaactatatttgaaataatgtggctgttttaccagctaagtaaatttttattgcctgttctaggcatacaatcatgacttgaaacactagaaatatgttccaagttacatctaaataacaaaatatcttttcttgaacaacttccgagttgacatccaaataatgtatctaccttatctcaaatctgtacttgcatctaaattaatagggtatatgctagaaatttaactacaattttcaagtaggatatagtaactaaaaatagctccctaaaccttatttcataagactgtgttcctgacatgtacactaaatcttattttaactatgatggtttgctaaaaataaagccattgtaaaagtttctttgtagtgcttaatatataggtatgcttatccttaaacaacttataaagtaaaatgcaataactacttttctgccatagaataattatttccacagatcacagatattttttaaattatagctaagtaaaagttgcagtaacaatatgaaactataacatatacatgaaacattaatgataaaatgaaagtgataatacagctttagaggtaatgaacaaagagcatcaaaagcaaagtctgaagctgcctggctcataaaacactgagctaaaccagtagccagggtgaaagaattaatgaagtcagactaagaagaaaagataacaggaatggaaggcaagttagcagataccaggactttatcatttaattttatttcgtaggaacttctggagctttttccctgatttccatcagtgctttcaagtaacacacagttagggttcttgtgagcaaaaaagaaactcaaccactgattcataagttacatcacatttacatttcttttcaaaattttaagtttaaacaagtattttccaattatgtcacagttaaatccttattatcaacttttctaatgaaatcatgctttaaatacaaatctgatgaacttctatgactttctcatttaatcaaagattttacatttgttactaggtttttttttcctattaataagctatgttgaattgttaatgatggactctcatttctaaattgaagattcatattgagcagaaagcagaaagagcagttccttgaattttccagttgaaaaagtgccaactgttcattatttaagaacaatttgtcctaaagagcttctgcacagcaaaagaaactaccatgagagtgaacaggcaacctagagaatgggagaaaacttttacaatctacccatctgacaaagggctaatatccagaatctacaaagaacttaaacaaacttccaagaaaaaatcaaacaaccccatcaaaaagtgggcgaaggatatgaacagacactactcaaaagaatacatttatgcagcgaacagacacatgaaaaaatgctcatcatcactggccatcagagaaatgcaaatcaaaaccacaatgagataccatctcacaccagttagaatagtgatcattaaaaagtcaggaaacaacaggtgctggagaggatgtggagaaacaggaacacttttacactgttggtgggactgtaaactagttcaagtcagtgtggcaattcctcagtgatctagaactagaaataccatttgacccagcaatcccattactgggtatatacccaaaggagtataaatcatgctgctataaagacacatgcacatgtatgtttactgcagcactattcacaatagcaaagacttggaaccaacccaaatgtccatcaatgatagactggattaagaaaatgtgacacatagacaccatggaatactatgcagccataaaaaaggatgagcttcatgtccttggtagggacatggatgaagctagaaaccatcattctgagcaaactatcgcaaggacagaaaaccaaacaccgcgtgttctcactcataggtgggaactgaacaatgagaacacttggacacagggtggggaacatcacacaccagggcctgtcatggggtatggggaggggggagggatagcattaggagatatacctaatgtaagtgatgagttaatgggtgcagcacactaacatggcacatgtatacatatgtaacaaatctgtatgttgtgcacatgtaccctagagcttaaggtatataaaaaaagagcaatttgtcccaatatgtaaaacatataatcattcctgtacagatcaaattaatgcagcctgaaatcttattttctaaagagaaaaaggtacataggtacaaagtttgaactataaatattaagagtgctcaaaaaatggcgttttaagaataaagaaggaatagtcaggaataacacaggaacatttaaatatttactaggtaccaaatcctgtgctaagtacttaatgaatattgtcatttaatatagaagaacaaggttctacttccagctatgcaatctaaagcctataacctcaggtaaatcactcaatctctgggccacatatatttttgttttgttcttctgtaaaataatgataataccacttgctgtaacttcttcattaattgtttcaaggaccaaatgggatacatgaaaatatctataaaattgcaaaggactctataattgtaaataaggggttgttattagatggtgcatgaattctgttatttaaatttagtttaaatgtctcattacaaggcaactcaatatggtgtttttataaataaattgtaaaagaaggaattctggtatattaattaacttaaattgactttagtataaattttaggttccttctaacactttctagttaatctgctgtcagtgccaaaccagaaaggaagactgcctatctataaactctactgaagttttctacttctccaaacaacctgacctcacaactttcatgtttttatattatatgaatttgtcatgagtaagaaatttgcacatactttttgctttgaaacagaagtttagatatcttcctaaatgcaatcatcacactcttcaaaagtaacatcaagacttgctagtaattcttctccttgttagcaatactacaaactcgttcatttggcaacaaatctgcaacttgtaaaaaaaaaaaaaaaactaaaatactgtacactctttaatcctgtaatcccactctagcaatatattctaataaaccaaaagtaaactacataaacatattcacaactatagtttataaaagaaaaaaaaaacgaaaataaccctaacacagtatagcaaacaaaccatggtagttaccctcacctgatgaaatattacctctatagctttaaaaataagtacctggcgacaaataaaaagtgtatttgtgaaaaaaacagaccagagaacagtatgaaaacattgattacaactttgtaataatgtgcatataacaaacagggaaacataatttccagtgacacaacatctaaaatagaactaacttttttcccagttgaactcattaaacttaagaaccatttttaaagctatccaaaccagatacaggaaaattacacacagttttacaaaatttaatctttaagggaacaatcaaggtgatctgaaccccaattatttaaagttaagcaaattagaacctcaggaagatatcaagtcactgataatgttaacaatactctaaaatccatagtataatttagtatattagctgagagtgtactagacttctcaactattttaatcaatttttcttcatagcaggtgttaattatgaaataatctatcgccagacacggtggctcacgcctgtaatcccagcactttgggaggccgaggtgggtagattgcctgagctcaggagttcgagaccagcctggggaacacggtgaaaccccgtctctactaaaatacaaaaaattagccgggcatggcagcatgcgcctgtaatcccagctactcaggaggctgagacaggagaaacgcctgaacctgggaggcagaggttgcagtaagccaagatcgcgccaccgcactccagcctggatgacagagagagactctatctcaaaaaaaaaagaaaaaagaaagaaaaaaaaagaaatcatctatctacaactgctcaagcctacatctgtgatcctctaaaaatttaagttgcccaaccaactggttttaacgagtataccaaacaattaccttcttcctaggtctctggatgaatatgataagactggtttcctgtttcagaactctcctgctgttaaaatacacacacacacacacacatatacacacacagacacacattcctctacagttttgctctcgctaaaaacatctaagaccgatcactaatgacgaatgaaacaaaatagatataacttacctatcagctttcaaaaatattattagttcaatgacgtgtcagatatacttgtcaacagcattatacttgaactaagccaaatgccaactgttaattttctacagcaaaatcacaaaaaaagcatatgaaaaactgtaaaaagttaaaactgtaatgctgacccagcattatcataaatttcctaagtgtctttaatacacttagatttataagttaacttctgtaatatcattctgcttacaaaagctatgcttttatcatttattttgccagaggtgattaacctaaaacaggttttggctactctataattatgcagaaagacataaggccactaatttttacagcaaaaaagatattcaaacaggtaaagtgcagaagatgttaagggatatcagcatcttgaaaaacaaagatctagtaatatttagtgcatattctctcaacattagctgcattttgaaaaaatagggttccagaatttccatacgcagtaattatgcagacctaaccatcaactaattcaccaatatttgaaacctactataggtaaggtactcagaaaacaaagttctaatacaaatgcgtctccgtctccggcaaggaggttttctttttccaataagccaactgcaaaacttttatagttgctaataacaatcaaaatttacctgtaatcccagcactttgggaggccgaggcaggcagatcacgaggtcaggagatcgagaccatcctggctaacacggtgaaaccccgtctctactaaaaatacaaaaaattagccgggcgccaccgtggtaggcgcctgtagtcccagctactcgggaggctgaggcaggagaatggcatgaacctgggaggcagagcttgcagtaagccgaaatcgtgccagtgcactccagcctgggtgacagagctagactccgtctcaaaaaaaaaaaaaaatttacctttcaacgtcctcttaatctgaatatttaaaagagaaaagttccaaacaagtgtgtgctagattgcatcattttatatttggctttaatgtaataaaatcaagtctctttattctatactacaagccaggaaaattggttggaaatgacttactttttttccaactggtaaaaatagctttgcctaagtgctgcagaattttagtcgaagaaaaacataaactagaaatgcatgtgaatttttaaatatgaaagccaacatattgtctgtcattcattactatattagtaagaatcataggagattgttctaataatacaaatatctaacaatattaaatgattcctattcccactgaaggttaactattatatcaactttataatcatacttgacaattcattcttaagtagtgcataatcaaaatatctaaaataacatacaccaaaatactagtcaaaatcatattttaaattttagtaatatgcaattttaaaatatattaacagagtcaacagtaagtctgcattgcttggtttgaatagataacacccttagttttaataaactactataaatgcttgttattgaagggataccattttattatgaaaccagttattgtaataggggaaaaagtacaattactaattatgattagctgtagaattttcatatttaaaggacatataaaaaaacagaaaatatttaggctgaaacttcaaagaaaaaactaattaagttaaccatttcaacaagtaaataagcttttaaaacatacaagtttaatacctgggaagataagagtaccaacagttagatgggagggataggaataaaaacaagggacagaaacacataacacctctcacaccctttaaatactattaagtaaacagaataggtaacgacttttaaacttttaatattcaggtaaaaatctcacctacatatgtgcctcacttaatgtaagagatataatttatgtatatatgtctattcagaaaggcccaaaaggtatttttttcatagcctccaattcagttctcaccaaagtctacaaactgagtctagtaaaccaatctactttcctcacagattaatctgaaaattggcaagatgtttctcgtaaaaaaaaaaaaaaaaaaaaggccacagacacaaagttgcatttgaaaatgtaaattcaaaatcatatctaaacttaaaatattattatgttaatcatttggcataacaaatttctcaagaaaatgtcaacatactaaatgaaacaaggtagattaaatcaatcagattctataatattaagccaaatacacaattttaaagatttacacaatttggtaagaccaaattcttgtgagtgaaaattaaagaaacaacttctatagtggcctaaaatgcaacagcaaaattttaaatggggaagctcatttgcatacagacaagaattaagttgtagaagatgaagaaaagaacttgaaaaatatttaaacaaatttttaagaaattcttattaaatcagttccctgattgagtcctgtaatactaaattcttatatatctcaaccagttaggaaaactagtttaaaatatcaaaatcttgtataacttaatttctcaagttaaaacatgatgtccagttaactatccaaacaatcgagggaaaaaaaaaaccaaatgactgaaggccaggcgtttattacacaatctttagttctcagccagtatctgtattgtaatagaaaaatataaataacagtataactattaggtttcatttttgcaaacgtttaaaatttgatattagtctttataaaaatcataattagattattccaaaaacagtggtgtcaaaaccacttatatcactaaattatcttaactttttcatacatttgagtaacagatggtaggccttagttcttggacactacacaataatcacaatctgtgtgaccttttcagtattaaaaaaaatccaaatagtattattaagcagcacgttagcatattttatagtattatatataatcacaaccacaatctagatatgtaaaactatgtcatactttcagtatactaagctattttatatagatttcctacagctagtccatgaaagatactcagatgtaagagtgtttcttaggttgtcaaaaagcataaatgcatacactcacaaacaaaatatttttgccatccctgttttcattagcaccccacaagaaggtatataccacacctagatcaaaatttccttaagtttaacagtcgcaacaattttacctcatttgggaaaatgttactctaacaagtaatctggcttttaattaaaaagagactaatttgtttctacctcaatattttaaatattttttgttctaactatatgaataaatgaataccacctcatgataaaaaattataatttaataaagttaaggttatttgttttagtatctgacacttaaaaattaaatctgataaaacatatgcaaaatttttaagcacaaatactagtactgatttaaaacgcaaataaatagcaaattgatcaattaatatcacaatgattacctgggcaactgtgcaaatataaaccgtatcattcaaaatatgcttcagggaacagtaacatcattataagcccatactccttctgattaaaaaaacagaaagcaatagtgttattaccactttactataaaaatgatgtggcagtttattctaattaccttctatatccactttaatttcaacacaatgtaatgttcttacaacaggaaaaggaaatgatagatctaaagtattcagctaaattttactttgtctcacttaaataagtaaaatatgctttcagtattaaatacaagtagagttactatatgtaattcgggggaaaaatcttcaaggctctaacacttcagttaggtttgtataacattatgatttcatgaatcaaaaccatgaaaatcctctctaatgtttaggttatcttaaatccacttaaaaaatcacaaaataaaaaaatggaaacaagcttaataaatgtataagtataggaaaataaatatttctgatgatttcaccatttaattaaggcaacgacaaagtgcaatggaaattgttttttaaaaagaacaccctcttaagttcaccatgaactaggttttaaagtatatgcatatgaacaaaactggaagctaatatgaaaacattaagttttagagaagtaggacagtgggtgatttttaaaattctctttagtcatgtttttaataaaagaaattttcttaagtacaataagcacatagttttcattcatatactgaaataaacatcataagccttattcaactgaattgtaacaatgagtcctatttgtcttaaataattggtatctcaaaatatcccatatttcaaaaggaattaacagtcaaatcttaaatttcttaagaatttaaaaaaaaataaggccttgacattttattctgcattcaaaagtgagaggcaaagcaaactgtaaaatcatgcaaacagaaaaaaaatcacagcaatctattcctagaacccttttgtaattacatttgcctgccctaaaaacaaaacaaaaccaaaaaattcagaatccactaaagctaccttcttggcatcttcccatctctgggctaacctaaaactccattccgattttgtttctttttttctaaaacttcactttaatacaagtttctaatttagataaataaagcactttaattcaacaggctggcatagcaaatttagggcctagaaaagaatgcaacacatggatcaaagaaccttagagtcagccctattttctttacttagaaatatttaagtttgtatagctcgttggaaatttgcaattttacattgtacatttaacttcatcatatctgactataataaaagcagctttagaataaaaaagcataaggtcaaagaatacattaaataacaaaatagtaagagaaaagtaactcccaacagttcaacaactacataattaaaggaaaaaggattactttaaaaactactagcaaaattaaaaaaaaaattaaacatccttctgaatactacgtacagtattaaaaacacttacggaaaacatcttcaaccttttctaacagaagttcaaagcaacactttcacaatcagccaaagaacacatgagtcctcttcaaataaaccttttttgttattagggatatcttctgtggacaaagttcttattatcatataaagaatactggcctagcagcagtcagaacacccagatgttaggactaactccatcactgatttagtaagttgaccttcttaaatatcacacctgggggcaaaggtactgattttcatcaaatattatacttattatataccagacattttacacagcattttgggctagataattctttgttgatggggaggggtcttgtgccatataggatgttaagcagcatcactggcttcaagcccctagccaatagcacactctaccaccccagctgtgaccaccaaaatgtctccagaaaatgctaaaagtcctagaggaggtgaaaggggatcactctcagatggcaaccaatactctgaaaaaaacctcacctgtacttttaacaaaactaaaaaaccactgtacaagtttaggatttttactcccattttggagttgtcgaaacagggttcactaaggttaggcagtgtatctacgtaactgataagtggctgagcggggatgtatttatttatttatttttgagagagggtctcactctgtcacccaggcaggagtacagtgtcccaatcacagctcaatgcagcctcaaagtcccagtctcaggtgatcccacctcagcctcctcagtagctgggactaccaatgcgcactataacacccgactaatttttgtatttttttttgtagagacagggtctgcctatgttgcccagactggtctcgaacttccagactcaagcaatctgccaacgctggcctcccaaagcactgggattacaggcatgagccaccacgcccagccttgagcagagatttaatctggactttaggtctagccaactccaaatctatgctccattccaccatactgcctttctaaactcactatctcgtctataaaatcaggataacattttccatgcaaagttacttagagtttacaggtcaaatgaaataatgcatgtataaattctaataacctaaaggagtataacatgttaagggtttgcttggtgggagataatgttcattggtggtcctcaaagtgtgatccccagagcaccagcatcagcatcacttgaaaacttctaagaaataaaaattctcaggtcccaatccagacctactgaatcagaaactctgagggtggagtaagcaatccatagcttaataagcccttcaggttgttctaacacactgaagtttaagaaccactcatgtaacataatgggaaaaatactgcaccaagtgccaaaaaagtcctgcatccttcttcagactcagtctttcactagccattaacaagatactgattccactggagctacaattcctaagctgcaaaaaataaataaataaataaataaataaaataaaaaagaaagaaaaataaaagtaatgcctgttctgtctgcctcttaggttacctgttcttctttgcaaaatcaaatgagctaatgatttaaaaagtgtattgttaatcaaaaactacataagacagagtatatattagctaattcagtatctttcataaatgattctttcaaggtatacaataaattttacaacatggtcaaattaagcctagcaaaacactgtttttaccttataaaaatgaataaaataaattttaaaaaatcccaggcattccattttatcgctgacaatcagtgtaaaataatttataatacacactaaaaaaaaaacctaaaaaatcaagcttaatgacatccccaaaatttcattttaaaagtacagttttcaattctatctaatttcatctccaatcagtttagagtaaccagaatactcaaaaagaagtctcacaaagagagggaattttaaatggaaaagaatcctgcattttgaaataagcaaaaagtttgtaactttaaacatgtatacgatatttatgaatcactctaaaaatacatctattcatgccagcaatggtgggttaaatttttaaacgcatctaattaaaagagtatctgaggccgggcgcagtggctcatgcctgtaatctcagcactttagcaggctgagacaggcagattacctgaggtcaagagttcgaggccagcctgaccaacatggagaaaccccccatctctactgaaaaaaaaaatataaaattagccgggcgtggtggcgcatgcctgtaattccagctacttgggaggctgcggcaagagaattgcttgaacccaggaggcggaggctgtggtgagccgagatcacaccattgcactccagcctgggcaacaacagcaaaactccatctccaaagagtatctaattcaaatcacaatgcatttcataataccttaaataattacatcctcttcaaaagatcaaaagtattaaacaaataaaattcacagaatacaatctttgcaattactagtaaagaacagagaaccttattgtacttcagcctgaaaatctacaaaaatcaaaggaaataaaagtcaaagctatgcttaagtgctctaatattaaatcaacagtaagtcttaggtagtgatctaaagcaaaaactaggtgcaaggagagagattgatttagaaaactcagctgtgctcagatgccaaaatgcacaattcaattctacaacctagacatggaccaaaaatacagctagtttacaaaacacataaaatgcataaaaatcacataatcagaaagtcacatagtatcagacagagtgtattcactctgcaatataaaacacacacacaaaaaatccactcactagaagtcaagtgcttcactactaagagtgctgtggtacatctgggaaatcagtacagcccaagggggggaaaaataataatccctatgtacacataatggcctttactggacagataagcttattccatctttccccatattcaattaaaaaaatgaagaaaaaaatcctttagttctttacttctttcttcccacgtcttgggcctaaatcatattgagaatcctggccaaatgtggaaataggactcaataatacagagactgaatactttaaaagttcccatattatgttaatgcattacagattatattaagtgtccattttattgtaataaatgtaacttgacattcagttgcaagactccctcaaaaggctgaaattttcaaaaggaaatgctaaaaaatatacctctattgaccaaagtttacataactcatattaagtttattacatttgaggcagagtttactttatgtgaataaaaatgtatgatagttaagttgacctatcttcaacactaaagaaaatttaagattataacaaagtttaaaaattctacttcattatgctaataggaagtttttgccttttatattttaaagcaaatagtttttgattggcataattaattttactttggtcaacagtttgagttagcagagatttatttcccatttgtgatgaaccagcaaaatcacagacatgtcatacccagacttcctaaaggaatacccttatttttaaaaacacttataacttgaaacaaaatcctaacatggcccaaactgaggaaattcagttacaatcatacaccataaatgaaaatacaaataatttccctacatacataacctgaaattacagtttttcagagcagtagctaccatttaagtatttacaatgtggcaggtactatgctaaatgaaattacttattattatctcacttactattcaagataaacgtatgcggtaggttccattatcatccccattttacagataaaatagattgagaaaatctaaataacctactcaaagtcatccagctactaaatggaagatccaggattacaaaacaagcagtctggctccagagcccacactgcctccctaaaatctaaaatgaaacaatgtatatatgcttaaaagtatagataaacgtaatactcaaaattttaacataatttaaaatagatctgaccatatttaaaaactatagaacaatattctctaaggtagtcttttctttaaagaaacaaaaattcgttttttaataaatattaagataaaaggtttgctaactttgtatacacatacacacacagagaaatcaaacactggttagattcactgttcatatttgaagtggtgagtactgataataattatgtgtataattacttaaaatataatgtgtaaacagtcttctttttcacactatgtggaggtcaagaaaattcttttgatggcaggtacagctacaatatccatctctcaatattctcaacactggccaggcgcagtggctcacgcctgtaatcccagcattttgggaggccgaggcaggcggatcacttgaggtctggagtttgagaccagcctggccaaggtggtaaaaccccatctctactaaaagtacaaaaactatctgggcgtggtggcatgcacctataatcccagctgcttgggaggttcaggcaggagaatcgcctgaacctgggaggcagaggttccagtgagccgagatcctgccactgcaccccagactgggcgatagagcgagattccatctcaaaaaaaaaaaaaaaaaaaaaaaaattctcaacactgccaaaaagtaatgccttgaagatgtcctaataccttgaagatgttcacacatgtcccaatgtcaactgttgcaaatgaagaatctgccttaactatacagaactaaaacttcccaaataaaattaattcacccttaaattatgttactcttcttatatttgccgatacttatttattccagtgcaaattattttaaaagaattaaattgctaatacttcctctgcaaccaatgaaaaaaattcaaaaaactaagggaaaggtgaatagtcaagtacaatatactaatttcacctttcttggcaaattattttacattagtgaatgcatatactcaatatgtacaaagagaatcaccaaacacagaccaatatacttttaaccacctatggaagaacgtatatgtggcagtaatgcaccctataaaagacttacagttatcagtttgctcagcaaagccttaccaatttaaggttagtctaacctcaacattattctctctgataagcaactaaattaatttcaaagctaccaaatagaaagcaattgtaaaacagaactgactgaccccagtctcacaaatttcctaagtcactatcttcagaacaaatcctaacatcttttcttaatgaattcaggccacaagatgaattcttcaatgctgactgtgaaaatcaagtttaacagaaaaaatgaagaaaaaggtaacaagattaagaactaatgggttccatgtaataaaacttctgaactgtttgtttaacccaacggtttctacagaaaaaaaaaaatacatttcttaagctatgttaatattacattttctggaagctaaatccttgtagtatggcagaggcctcacatttcaattaagcagaaaattgtcatatgcatgcaacacttctacaattctctttacaaactctgaagtcacacacaatatcaataataaaagtgatttcctaagctttcgtcttacttaaaagattgagatgaaaatttaaaaatagcacgtttacttcaagtgaattaatgttaaaactttgtgaagtgaatttcccataacaaatactcctccattaaaagtcactgaagtgattacttcagaagcggcttaaaatatttttttaagtgttgcgctatcaccaaatgaacaaacagcaaatggaggcaaatttcaaaataacattagaaaataagaattgaagacttcttcacttccaaaaagtaagccatttcataacactaagaagtttatgtattttatgtggctatgagaaagcagatgcactgttccatacaaaaattaaaatatcaccagttgcctttcccatgttattaaaaataaaattctaaaaaggtaataaaggaatctttctttactatcttctaaaactaagtttaaaatgaaggtggttatacctcaccatattttattatctttaatcatttagtatttacttagtatattataagcaatgtaaatctgcattgatgactatactgctgtgcaaacttttacactggcagcaataaaattcctttttcctcatataaactgtacattactcctttcagttgtgctttacacttgaataagcactatgaaaaatgaagtttgtaagttatcatacagcaattaggtggtccagtcatgtttttcaggaaatataacttagcagatacaaaacaatgtaaaataaatgttgtgaatagaatactttttaaaaccctcatgattaatttcagtaatcacttaccttgaggtaatttaggtaacttcaatagtcactgtactctctacaagttaaaagtattccctgtgaacatttatttgaaaagaggcaaatctaccaaacaataaaaatacaacagaagcctaacgtttccacataccctaaatacacttaatttttctatagtctcaaattcagcactatatttcagactaatattaagcatataaccctactaacaaatttttagaataatttaattttgcgataatattttaaaactgaattattgtcctcaattttcctcggagaaatggcttcattattaatctttctttatcagataaaaatactccaatcactactttcataaaggaatttaacttttcacaggttagttactgaaataaatactacaacatgtcaaagacaaagtcttcaatgacaattttaatgccttcccactccaataaacagaaaacattaacgtgaaaacaagcaaaccaagtacgttggaatatcaaaattattgggagtgcaattatcaaaaaagcaagcacttcactgactttccttactgactttttttcatatcaacttttggctcaataaaaccacaactctagaaattaagtgttattagtcatttgacgcaatatttgatactgctttctatgcatatcataactaaaagtacagttttagagaaagttttaagtcacacaaatttcatgtgtagagaccaacatacgctgaaatcaaagaaaatgccagtcatgtcacagctcacatgtaaaaacctggtaaaataattttaaggtcttaataaccctgataatttaaaatcaagtgggaaaagtaaaagtagtgtgttatgtactttaagtgctgaaagaaatctgtctcccagacagcattcaattattttcttcaaaggcttttttttcaaagttacataaacatttaattttttgttcctatatatttggatgactgtcagtaattcatgctaatagtagactgctttggaagtcacaaaagaatttttccataattatcttctgggcaagcgggtccagtttagccttagtaacattctcaattaatgtcaacttcaaaatttgcaaatactcttttaaaataatatttttggcttaacagaaaactaaattttgggaagctacttcttcagtaagttttacattcatttcaaaacaaaaacttgggcaaaattaactgtgcacatttatatgcagctaacataatccaacggaataaaacctctcccgatataaacgctgtcttaaaaaaaaatattccccacaatttttagcaggacatatagacactgtagtgtcactctacctttagacaaaatgcaactgacatttgctaagaaataacttttattaaaaatactgtgctagtacttatgcaattacataattttaactaaatattgtccactgccacaattcgcattaccaaactcatattaccaaattttaggccttgatagagcctaaatgcttcagtcacttcagaccaataacttaattctgttttcacataccttatacactggcctaccaatagctctcaattcctgtcaatactttccccattctgcaaaaagagggccccatccccatccctaatcaaaaccaatgtgttgtacctgaaactgcaaagattaatgcttttcgatgaccactaacttttgaagcccgaaggcctaacttttagacaactaaagctacacactgttaaaattcttgggcttctgtcttattcagcaagctgactcagtaaatttaatacactgtatgaaaaaagctaacatacctacaatctaaagctggagtaaacccctcttgccagcatttctagatattagctggtaaaatacaactgacattctacacaaatcagtaaaattaacgataccaaaaggtgtcagaggacctgaaacctaaaaacggtgagcagcaattctggcatcacaacaatacttaaatttcaagcatgaactgaagttttatttctgcaatcttcacttgctacacacaatacccttgaacctacacattaccatctgggatcagaaactactcaatatccattctatgtttatgacaagagcactgaacattaaatgctactgaagtgcaaatttcaagcactatcctacatcaccccatagggagagaaaaaggtaaatataacaaagatctagtaagaacgccttataaggtatattatggcactattgacttcaaactacaaaacttctacatacagttcaaagttgtaggtaacttaagtttaaacattaacaaaactactttttgccctcaatgtgcaccatatatactgaaaatgattctgcttctaaagttatgcaaatcagtcatattttaaaagaatctatcaatgcaactcaggaaactaaaacaatcactgcaagattctgatgcaatatgcgtacgtgcaacactaattttcattttattctgatctaaacccttgatctagggcctaagccaagatttaatcgaaatatgctcaacctcaaaaagcgtctacttttttgttcatttaggagaccggattaccgagctcgctaatccactaacagtgtactgtattctgtattaacggacaatagccctcaggaagagaccatatagatagcctaagaaagcaatcggtggcttgacacttgcaaccaggcaagagttccgtctagccaaacacaccctaggttgaatacacagaaaggaaacacaaaatatatgacctagcaacctgaccagggttaaatgttatagtcacccaaactacggacattttcgcatccgtctactcccacgttctaagagagtgacagaaaggtaaagaggagcagccgcagaaatggatacaggtcaagtctaagtcgaatccatcctcttgatatctccttttgtttctgctaacgatctctttgatgatggctgtcatgtctgggagcctgtggctgaagaaaaaggaggagagagatggcagaagctgctggtggcggggcttcttctgcaggatggaaatggctctggacttggcggtagctgatgcccctcgctctgccgccgcttggctctggaccgcagccgggtaatggctgctgcggcggctgctggatggttgcagcgactgggcctgcttctcctcagcagccagaggcctggcagcggcggcagcggaatggggagaagacgaataatcctccgaacggctgcctccgccggcggcctccggagcccgggccacggggggtgcggcggcggcgcacgggaggtttaaaaccggcccgggtccctggatgtgccagccgccgccgccgccgtgttggaggcagtagaaggggagagaccaactctccggcgttcccagccctggaaatggtgacaggcgactcagaccccctccctggagctgcagccgccgcggccgccgccgccgccgcttctcccccccgctccaggagcgggaggtgccgccgccgccgccgcgcctcagccggctcccgcccgagcccacggcttccaccttccctttcaggagaagccgaggaagaggctgcacggttagaaaagacgaagaggaggcgagaaacgccgccgctgccgccgccgcaggccggccggctccccgagggcgctgcccccgcggctgctcacaggcgctgagaggggctccgggccgcggccgccgccgtctctcatctccctcgcctgagcccggcctcgcctcacagcggctcaactctcaaacttccatcatggctgcagcttccgagaggagagaactgagcgcagtcgcgtcccagcgccgagcgcgtatcctgccgcagcgcataaagagtcccgccacatcaccgcccgccggcctgcccgccccctccgccgccgcgccgggagcccgggcgcctcggaagaccgaggggaggcgggaggcgagcgagaggcggacgggaccgcgccgggcgaggggagggcagggcagggcagggggcggtaggagggggcagagcggtagctctgggtgcgagcgcagagtccccaagccgcaggctctactgagcatgcccagtgtagctgcctggggcttgctcgggccggttcccagccgccagcctgcagctgcacttgctgcggcttttgcagcaacgcgaggcgaggataacgagctaagcctcggcctctgcccagaaacccagccggaggcagggtaggctgttgtggggcgggggtggaggactgatgatgaaagctgagatgggtgcgttgagcagtgtcactgactcgagtctgaggttacctgtgcacaggtgaaaaggaccaggtgaccacgctgctcagtgtagagggaaatgcagggacggtccctgcaaggggaataccctccccccttgcctctacccctagatttccgcggcgtggactgcattcgctctttccttttgcaccgctgtcggatcacaatcgttcgcagagatttgactgtaacagcctttgcctagagattcccccttcccccaaatctgtgtcctcatggtgtcagtcttagcacaaagagcaacctgctattgtgtcgccagcgtgtatcacctcatccggctcccttgcagcgccccacctctcgcttccccggtaactcggctcgtttgccctaaaaatgaaagctctcagccgagcgtgctgaacgtgaacacatagccgttgaatttcaagggcccaaagggcacctatctaaatgaactgaaagaggatccctgtgagtgggacgcaccccgcaggcctctcctgcgcccgctccggtgcccccaagagagtcgagcatctttcccctcgggctccaggtcggttcgcggcgtcggagtcaagctcggttctcagagaccacctagccccgcccccccttggccgccgtgaaaacccggcaggatggatcgcccggggccaggctccgcgcgccccggccggaccgtgcacgtttggggttaccgggttgagtggaaagtacggaacggtaggaagctgcagcccagcgagtgggcggggcgaggagacctaggagggttcaaaaggaggtggaaggatacacgggccacagtcggaactactttccgaaggaggtcacgtgtgtccctagttggggaactttccaaattcccactccccagtgatagctccggaggcaagtcgtcttcttcctttgctcggggtgctcttgcctggtgcaggcagcggaaccccaacccttcctgcgccgcggcggaaacaggggctcggaccagcctcccgaaggagcgctgtcggggctggcgcttggggaactggttacacaagcacccacatccaaacacgtgcccccgcctccccgcctgctggctgccgccgattcttacagaacgcggggagagagtccccaaactggtgccactcctcgcctgctaccctaagagcaagccaaaggactgagacctgagactcactccttgctctacatcgacctattctgcgccttcccaaacgtgggaaaaggagctgggcgctagggctctcgggcctctccatcgctgatgccctgccgcttagggtgaacccttttggttctgtgcttgagggtatctcctgctgcagcccagagcgtgcattctccgatgttgcaacaaacgtccagtcactacccctgagctggtgagcgcgccccacctactgtggactcagccaagtgacttatctggtctgagaacctagtcaatggccgtcagcccagaacaaacctgtcaagtctgtttacagccccgattgggctgacctgtcaccgtgagagagctgattcggaaatgctgagagttggatcgcactcctaccccgcaccccacccgtcaaggatctacaaagcaagtagtcgacccgcttaaagagaatgagcatcaacaccagtctgggaatttattgttttttcatttcccttaggaagtagaactacagacgacaatttgagtcaaaaaatatctaacgagacctaggttgaagcactgagttgtttttcaaactttgagagaatgagaatcaatctgcatgtgtgttcaataattgtaagtgcctagcaaagtctaaagagggtttatgctgtatttgagaaagagtactgtatatgtgcacatcatagttgcaggcaacctctgaagactagaaacctcaagagacctagcgcagaaagccacaggccattacctaactccgggactactaattaaacctgggatatttacagtgttcttagagacctctgaggctccataaaactttgcacttatatacagcatttaagatagctgtgcaggagttaacaacctgctgaagcttcagtgttgatatttattgaagactggttttgtgcatagttctggtcagcttgggaaaggcaaggaccacagtggaaaaggaaatggaaagcaaccggaaaagagtaagagaaaggcctccagttgatttccagagatgcagatactgtccacacagcctagcgtgaactacagatttcattattgtataaataaccaaagataaggagttcctgatgtctaggtgttctactagattgcatggtaaaaaccagagctgtgtttaattatcaattactgcgtggtagaaaaagggaaaatgaagatgaacttttaaaaggggagtagattagggaggggtaaaatgtctcacatttgtttcttagattgctgatcttgtctccagagtccctgttattagcactgcccttctctgtccctcccctggagcctaccctaagtgacaattagtctcatagcatctgagaatctctgaaatctgctttcatggaagcaaatgaaacaagggtgcattcctgtcctggtgcgacagaatcctcttggattccatggcacagagttactctggagcagagataatctgcatcaccagcactaaagtgctagaatatgagaccagcctccaagtacttccatccggctgaagaaagaaaatgggaaatgggttttactgcttctctaaacatcaggtccctctacttctctctagtggtgaatgaaaggatcatcaatgttggcagatatttggccagcccaacagcaacatcaggtggttattaggagttggtgaataaaatcctccttctgttcctagtgttaagttgtttctgaaagaaatactgatgcatccttttccaattttttgtttttcttttcctttctacccaaatggctggccctatctaaactaaagaaagtttcaaaaatagtacttttttaaagttcagttgaaaatacctgcttggctgtatagatattacaatacactggtctccaagcacttcagttctttttttttttttctttttttttttttttttttgagacggagtctcacaggctggagtgcagtggcatgatctcggttcactgcaacctctgcctcccaggttcaagcaattcccctgcctcagcctcccgagtagctgggactacaggcgcacaccatcatgccgggctaattttttgtagtttagtaaagacagggtttcaccatgttggtcaggatggtctcgatctcctgacctcgtgatctgcccgccacggcctcccaaagtgctgggattacaggcgtgagccaccgcgcccggccatacttagttctttacctgtctggattcagaaccagaataccatagggagaagtagaagcttgtaacaaagggacaattatataaagcttcagggtgactatgtagattgattagtaagcatggtaaactagctttaattatcgcttctaacagctgattccaaaactctattgttactacaccaaaataatgtcgaaagaaaatttctttcttattttctttgataagcgaaatgaccagcaacttgatgtggatgatataaatacttgatgtgctctttgtaggtcatctgctaagatgtcttttgtgtaaacactctgatctctatagtgcctttctcatctcccatacgctgacctttcaaaaagggatctaactcaatagctttaatttttaaacaatcttctgtatttctgtctgtttaactactgttttctaaataatacagaatataaaaacataataatcattggattgaatgtaaacccattgttccaagggtctgaggttttccccttatttcatttatcctaataacaaacattattgttctttcaataaagataattttaagacattctccaaaaggcgctactgtgggtcatacaagtaactatattctaaaagagaattttccattattgtctacaagcttcccatgtcccaaatctctcctgaagctatttcagatgccatggtgtcatctttcacatcttggtagagagatgtgctgtatgaaatcatcattctcagagaaataagggttgagttggttgctcctgagaacaatagagcagaccaggtactcactgtgtccaagtggcgttcagaaattttgtcttggaccgtggagcaatacaaataaaaaagacataacatgacaagacagctttgactatgttagtctccaggctaacactagctaccaattattctacttggtccccttaatactaactctagccatatggagcacattgtttgctttttagaccttccaataatagaaaaaggtaattcccatataccagaaaatattgggacacctaccaggtgcttcatagagtaggcagaaattttttttttttttttttttttttttttttttgagacggagtctccctctgttcctcaggctggagtgcagtgacgtgatcatggctcactgcaacctctgcagaatagcccgaatttgtctaggtagagggacattgagaaggagccaaaaccctgctctgcctaactcctacaattttccccttcaaaacatccttctggcctctaaggcatcacaaaaaacagcacctttttcaaagagaaaatgcatgggacaaatagccctggaccatgaaaaaaggcagacttagagcttatctgctttttctttacttcttttcccttattaagactccacactccatttaaagaatcttttttgtccatcctcttgagggtaggggatcttatctcaattcatttatttaatgattcaatcaacaaatatttgggagcctattaagtggcaatactgttctaagctctatggacagagcagtgactactatggcatatagtgttcactgtcatggaatttagtctgcattgaaaacttgacttctatggctgacattgttacaacttcttcccagcccacagagtaaaggtaaagcaataggaagataccctgacatttgataattgttttgttttgtttttgagacagtctcgctctgttgcccaggctggagtgcagtagcacaatctcagctcactgcaacctccgcctcccgaggtgtttaagcaattctcctgcctcagtctcccgagtagctgggatgacaggcatgcaccactgtgcctggctaattttttgtttttttagtagagacggggtttcgccatgttggccaggctggtcttgaattcctggcctgaagggatctgcccacctccacctcccaaagtgctgagattacaggtgtgagccactgcacctggctggataattgttttcaattatctattgctgcataataaattaccttaaaactttctgttgtcttcctcttgggacccaggcactgtgtaaagaagcttgggctggaccactgaatgatgagcaaccacagcaagaaaggagtccctaaccattttagctactttaactgaggtcccagacatgtgggaagccatcttggacattccagacccagccaaactcacagcagaataaagcacatgtctgacctgaactgataccatgggggccgcttaaaacttagtggctcaaaacaactaccaccatttatttcctcacaattctgcaattggggaagggcacagctggacaggtcggctccccaatgacattagctagggtcagacgtgctttattcagctgtgaatttggctgggtctggaatgtccaagatagcttaccacatgtctgggacctcagctagagtagctaaaaatggttaggagcctcctttctttgtgtggttgctcattattcagtggtccaacccaggcttctttatacagtgcctggatcccaagaggaagacagcagaaaatacagggtctcttaaatcctgggttcagaagtcccagaatgtcacttccactgcattctcttggccaagcaagtcacaaggacagcccagattcaaaaggaagggaaagatactccttgatggaagtagcagctgggatgagaaattgttgccagtcaatttgggaaatagtctatcatgatccatcctccagctacaacagtatacatatgcacatacatgcacacacacacacacacgacatgcagaatacactcactccctttctccaaaactattattctatatagcatcagtgttaaacttcaggatctagtaatctatactaggcctagatgtggatgaggcatttcagatgcagcttttcttcatctggagacctgttaactaaaagagaagttacatacacaacatacaatgctgaaaaagggataggataactgcagtagacacgcctgtttgaaaatggcggaaatggaaggcatatagcagtcattagtccatagcaattctgaaatccagccaagcactgttaccggtcctctgaggatcaagttctccattagtgcctaggttggcctccctcagaatagtttcccaatgcgttgttctcaagagctcttagttccaccctctggggtctagactaggaactctgaatcaattttcctttttcataagaaactgccttccttgaacagaggcttcagaaataacaccacacatctacaaccatctgatctttgacaaacctgacaaaaacaagaaatggggaaaagattccctatttaataaatggtgctgggaaaactggctagccatatgtagaaagctgaaactggatcctttccttacaccttatacaaaaattaattcaatatggattaaagacttaaatgttagacataaaaactataaaaaccctagaagaaaacctaggcaataccattcaggacataggcatgggcaaggacttcatgactaaaacaccaaaagcaatggcaacaaaagccaaaatagacaaatgggatctaattaaactaaagagcttctgcacagcaaaagaaactaccatcagagtgaacagacaacctacagaatgggagaaaatttttacaatctacccatctgacaaagggctaatatccagaatctaaaaagaacttaaacaaatttacaagaaaaagtaaagcagccccatcaaaaagtgggcaaaggatatgaacagacactttccaaaagaagacatttatagacatttatgcagtgaacagacacatgaaaaaatgctcgtcatcgctggtcgtcagagaaatgcaaatcaaaaccacaatgagataccatctcacaccagttagaatggtgataattaaaaaatcaggaaacaacagatgctggagaggatgtggagaatagcttttacactgttggtgggactgtaaactagttcaaccattgtggaagacagtgtggcgattcctcaaggatctggaactagaaataccatttgacccagcaatcccattactgggtatatacccaaaggattataaatcatgctactataaaaacacatgcacacgtatgtttattgaggtactattcacaatagcaaagacttggaaccaacataaaatgtccatcaatgatagactggatttagaaaatgtggcacgtacacaccatggaatactatgcagccataaaaaaggatgagcttcatgtcctttgtagggacatggatgaagttagaaaccatcattctgagcaaactatcacaaggatagaaaaccagacaccacatgttctcactcataggtgggaattgaataatgagaacacttggacacacggcggggaatgtcacacaccagggcctgtcgtgggggggatgggggagggatagcattaggagaaatacctaatataaataaccagttaatgggtacagcaaaccaacacagcacatgtatacatatgtaacaaacctgcacattgtgcacatgtaccctagaacttaaagtataataaaaaaacaaaaacaaaaacaaaaaagtaggtataaatataagcgcagaactgcttttgagcagctacgccgggcacatcgcttgtgggttagcctgctctgcaaggagcagtacctctgctgctgtacactgccgcttcaataaaagttactaacaccaccaaaaaaaaaaaagaaaagaaactgccttccttccttttacagttaaataactctctcagcctgcttcctgcccgtaggaagttgggggcttggaaggttttttcattttgaactgtctcttccttagtccaagctggtgcaattttatccatataactctctttaaaattttgtgactcttattggggttcacttcttgcccgcaaagcaacatctataattctttcaaaaacaaacctctctgcctgtagtcctagcactttgggaggccaaggtgggaggattgcttgaggccagcagtttgagaccagcctaggaaacatagcgagactctgtctctgaaaaaaattaaaaatttaaattaaaaatttaaaaaacctctctctactgtggacctgtagaggtgactactgtgggacaacacttaagattcttagaagaccttttgtctagatgagaggcaatatcttaaatattttagaggtcttagcaccaagtctcgataagatctttaacttgaggccaattctacaggcaggcccttgaggccatttcttactttgagagtctttctggcataaagagactctgcttaaaaatgggatagttccttttttaacacatctctgtctcttgtgttatcatcatacatcacttgtgtatcttcgtacatccctaaaagaagccaattgtcactctgaacattcagcctgaatgttgccaaatccacaagtttattaggtacactttctgtcttctatgttttaccatacatctgaccacaagggttgtcaaacatcttgccactactaacaccatttctccaaccttcaatagcaattttctcactgctcttccagctctgttagaagtcttttccccagactaaggagacatatcaactaagagcaagtaagggaacctggattaaatcttggaacagaaaaagaacatcactacaaaaacaagtgaatttcatataaggttcgtaccttgtgctaatttcctggttttgataatcgttctgtggctattaataagttattggccaggaacagtggctcatgcctgtaattctgacactttaggaggctgaagtgggaggatggcttgaacccaggagttcgagaccaacctgggcaacatagtgagaccccgtctcttgaaagcagggaattttttttttttttttttttgaggcagaatctcactctgtcagccaggttggagtgcagtggtgcaatctcggctcacggcaaccttcacctcctggttcaagcgattctcttaccttggcctcccaagtagctgggattatgggcgcatgccaccacgcacagctaatttttgtatttttagtagagatggggttttgccatgttggccaggctggtcttgaactcctagcctcacgcaatccgcccacctcggcctcccaaagtgctgggattataggcgtgagccactgtgcctggccaagacccccatctctttaaaaaaaaaaaaagttatcaatactagggctgctggataacaagtatacgtaaactccacaccaggccaggcatggtggctcactcctgtcatcttagcactttgggaggccaggtgggtagattgcttgagctcaggaggttgagaccagcctgggcaaaatggaaaaaccatgtctctacaaaaaatacaaaaattagctgggcatggtggtgtgtgcctatagtcccagctacttgggaggctgaggtgggaagatcacctgagccccaggaggtcaaagttgcagtgagcagtgatcgcaccactatactccagcctggtgacagtgaaaccctgtgtcaaaaaaaaaaaaaaaaaaaaaaatccataccatttttgcaacttttttctaagtctagaattttttccaggccacacacgatggcccacacttgtaatcccagcactttgggaggccaaggcaggcggatcacttgaggtcaggggtttgagaccagactggccaatatggtgaaaccccatctctaataaaaatacaaaaattagctgggagtggtggcgcatgcttgtaatcctagctatttgggagggtggagcaggagaatcgcttgaactcgggaggtagaggttgcagtgagccgaaatcgcaccactgcactctagcctgggcaacagagcgagactctgcctcaaaaaaaaaattcttttaaaataaaatatttaaaaaccaaattagctaggcatggtggctcatacctataatcccagcattttgggaggctgagagggaagaattgcctgaggccaggacaacatagcaagaccccagtctctacaaaaaaataataattagctgggcatggtggcatgtgcctgtagttctagctactggggaagctgaaaaaagattcaagggaggggaaacagactccatctccttttggtgggaagggtggcatgcgtgtagaggcatggaggaattgttggtggccatcttccacaatgaccctagtcctatcccctataaataaccccccaaaacagaccattttacgtagtccttctctcaggtcagttctgcctagaatatctgtcatttaagaatcctatcagctgacaatttgattagcaactgaatgttttcagttgttttctattttgctccttaatcttctagtttgttaatgtgcttactcatctattttacagcatgattctactctaggactaatgtatttcccaaaagattcattaaaattcaatgaaataaaacaaaagtgataatacatatatatatacatgtgtttgcataaatacatacaaattatctggaagaataagagatgagataacacattctctctgagggcaggatagagagggaaggcttccaagggagataaatttctctttttatttattgttttttatatggttcaaaggttctttacaatgattattatatttataaggtagaaaggtgatttcatccattagaattaaaactaaaaatatatgtctattatcaagagaatattaaataaccaggaaagaagctcgattctaattgtattttaaaataaatgagcaccctaaagaatttccagaatttaagcgtaagggtctgtttggtgtttgctggacaatagaaatacatgggaatatctgccataaatggtacatagtagagatgtgtggtagacaggctgtatcttatcctgaataccctctcttccccagatcaatggtcttgaccagatctattttttactctttgtactatttaataacttttgctgctcaaagaaaatgtcctcgaaaaataatcatatgacagcacagtacccccatcttcttccattcaagagagtggcagactgctttatcatccagtgcataagagctagaaaaaaacttcatagacccgctagtttaccaatctcattttacaaatgaagaaactgaggcgcaaagggtttacatgccccagattacacagcaactcagtgagggatcctcagttggagcccggagaattccctg

SEQ ID NO: 807 - DNA, 92584 bp, Mus musculus
cctttaatcccagcacttgggaggcagaggcaggcagatttctgagttcgaggccagcctggtctacaaagtgagttccaggacagccagggctatacagagaaaccctgtctcgaaaaaccaaaaaaaaaaaaaaaagaaaaaagaaaaaaaaaaaaagaaagcaaatcaggacactacctaagaaaagaagaacctatttccttctttccacacagtcaagattccaaacagatgatgagaaagtcctctgcttcctagcctatgccttggctctgttcccctcccccacctcccagcaggtataatatctaaactgtgtcagaagaccgtgactacggtatgatggtgttagacgacatccgctcagcgctgcttgcttcaggaccaaggtttaggtgacaccacagagcccatagtcttcctgcactttccctagttgtgagaaggatgggaaaagtgagaagaataagctcgtttttattctgtgattctgcgagccagatttaaccataagttactaaaacttgagatatttccatggtgacaaatggatataactgactcttttttatcctggtttataatcttctatcacaggagaacatcacgttttgctattttatatatatcacacacacacacacatacatacacacacatatatattttatttttatgtgtatagatattttgcctgcatgcatgtctatataccatatgtatgcccaatgcccaaggtagccagaataaggtgttggatccctagaatcagagttgaagatagttgtgagttatcatgtaggtgctaaagacccaggaagagtagcatatattcttaaccactcaacaacaacaacaacttcttcttcttcttcttcctcttcttcctcttcttcctcttcctcttcctcttcttcttctcttctcctccttcttctcttctcctcctctttcttctctcttcctcctcctcctcctccttcttctctcctcctcctccttcttctctcctcctcctcctccttctctcttcctcctcctccttcttctcccctttcctcttcttcctctctctctctctgtctctctttctttttttgatagaatttcatgtatcccaggccagcctagaactcactacatagccacagatgactttgaacttctgatttttctgccttcatttcccaagagctaggattacaggtatgagtcaccacacagagctatgttctgctatgtgtactaatgcatattttattttttaatttttaaaaacatttttaaaatcatttttaattatgtgcctgtgggggcccaagaggctctgtttttgttggagctggagttgtaggcagcttgagctaccctgagtgccttcagggaccctaagtcaagtcatgcactctttttgttttgttttgttttgttttgagacagggtttctctgtgtagccctggttgtcctggaactcactctatagaccaggttggcctcgaactgagaaatctgtctgcctttgcctcccaagtgctgggattaaaggcatgtgccaccactgcccagctatttgttcctttaaatgtgtcttctatattaaggaggaaagatggcccgatagttcacttatgctgtgctccaaagctcaaatgctttaaggttcttctctgttctttgtaatctgcaaagcaaacagatgtctggagtattctgcagtcttggagaactagggtcaagatttcttggcttaatttatatcaagccaaggatgctgtcaaaggagatcgatattgtagcaaaaaatgtttttttttttttttttggtttgcaaatttgtggatatagttgaaaagaacagtacatttctaaagtaacataaaataaatgtatatcaattttttcaaaattagtataatgccttttgtttttgttttgttttttgttttttgagacagggtttctctgtgtagccctggctgtcctggaactcactctgtacttgaattcagaaatctgcctgcctctgcctcccatataatgccttttataagacaagagagtttgatcgagacagaaagtttagctggaatgtgctgacccatacctgtaatcccagtacaaatgaaagaggaccatgaaaccaaggtcagcctgggcaacacagcaagaccctgtctcagaaggaaaatgaatagatttagaaattttaatctgtcaaattaaattataggaaaagatgctcagttaatagctaagttgaccagttaatactcaatattgtaaaatgcacaggacttgaaatgcagacaatcttgtatcttacaatcaacaagacctcaagaatacattaatttttgtttgtttgtttgtttttgtttttgttttggagacagggtctctctgtatagccctggctgtcctgtaatgtttttttttttaagatttatttatttattaatatgtaagtacactgtagctgtcttcagacacaccagaagagcacatcagatctcattacaaatggttgtgagccactatgtggttgctgggaattgaactcaggacttctggaagagcactcttaacaactgagccatctctccagccctccattaatgttaatacaaaaaaaagttgttaattctgttaatacaattaggtggcgaagaccctcaacagagaactgtctttttactgtatttagaaaaggcagaatttccaagttgaatttgacaacattaggcctttctatagtgttctttctgagattgttagcagtcacaaaaaacctcagttactatgggacttctgtaaaggtacaaacttactttatggattctgacacattgttttaataaaagacaggacagccgggcgtggtggcgcacgcctttaatcccagcactcgggagcagaggcaggcagatttctgagttcgaggccagcctggtctacaaagtgagttccaggacagccaggactacacagagaaaccctgtctcaaaaaacaaatgaacaaacaaacaaacaaacaaacaaacaaacgacaagacaaaaagaaccacccgaactggaaaagggctacagctcttttcaggtgttatttagtgtaaccatggaacacaatagtggtctatgactaggttccaaggtcaagttaagtaaaattaaagataccagcatttgggaggcagaggcaggtgtatctctgagtctacatagtaagttccagggcagccagggctacacagagaaatcctgtctcaaaaaacaaaaacaaaaacaaacacaaaaaacaaacaaacaaacaaacaatattctcttgatgacaggaaaatcaaagggcaccaaacaacagcatatgataaagagaaaaatgtaggcatgagtaggtgagaaagaaagggggtcgggtggggggcaggacatcacataggaaagtggaggtatagaagaaaaagtagaccaatgaaaggtctaacagcaatttcttctagccttctcttgcaaattttcttcatgtgtgtactcatttttgttgcttgtttttgagacaaagcctcattatgcaggcctggctctgttctagaactcactcaggtagacctagctggcctgggactcaaagatgcacttgcctctgccccactgagagggagattaaaggtgccactatgtactgatgtttgtacacaatagaagagaagaattgtaaagaatcaaaatggaaaaaaaaaaatacaaaaaacccaaaagatctgtttctggggaagaggaatggcgagccactggaaacttttacccacatgcatgtaatacttaaataaaagccttagtattgtattgtgagatttgggtttggggggtgggactaaaaagataacagacataaatattcatgaaaaaggggggtaggggaaacaggccgctaccatcctaccccagcaaggcaggcctgctgtaagctgagctcaaactgggctgcctgagactgttgagttctttggagcatcgctggcagcagcttactgactcctcagcaggtggcagcgttccctttgttctttggtgaagtttggcgttttcttcctaagacttcctttgcaagtcccttccttttcttctcttcagcccccactgaatgcatgagccgtcttcatacattggaaaaaatacttttcccaaggatcgtagggactgtgggcaattcacatttgcaggtttgactcctttttcttttttctttttctttttcttttttttttttttttggtttttcgagacgggggtttctctgtatatctctggctgtcctgaaactcactctgtagaccaggctggtctcgaactctgaaatccgcctgcctgcctctgcctcccgagtgctggggttaaaggcgtgcgccaccactgccctgctctagcatgtttgattcttttttttttttttgttttgtttttttttgttttttttgttttttttttgttttttgagacagggtttctctgtatagccctggctgtcctggaactcactttgtagaccaggctggcctcgaactcagaaatccgcctgcctctgcctcccgagtgctgggattaaaggcgtgcgccaccactgcccggcgcatgtttgattcttaagggcctcatccttaaaagtaacttcaggcttaacttgttagataacacacgtcacatctcaccccatgttctgtgtcctctaggactggaatgccatgaaaagccatcgctaattaaatttccccatgttaacctgctcaggtttatttaaaagctggggttttgcgccccccccccccccttttaattaaattggtatttggagctggctggtggtggcgcactcctttaatcccagcactctggaggcagaggcaggtggatttctgagttcgaggccagcctggtctacagagtgagttccaggacagccagggctatacagagaaaccctgtctcgaaaaacaaaaacaaaaacaaaaacaaaaacaaaacaacaaccaaaaaaaccccaaccaaacaaaaattggtatttggaaacgtcccacactcactcgtaaggatctgtcattgactcttgtgtaataggggcacgttataccactggtcctagtttctttgcttgtacaatgcagttgatggatgaggggatccttgcaatttctttttcatcttccatctttatatcacagagctgtctgtcaccatgtaggatggaaagagtctgtggtgctgtaaaaatacaattatttctagagggaaagaaaaatttttgaacagaacattgttaagtaatacaaagagtgaaaaacctagttgaagcagttgatagagaagagatgatatttggagtaagacagagcttgtacagcatccctgtagcatacagcatccctgtagcacacatccctgtagcacacagcatccctgtagcacacagcatccctgtagcacacaagcatccctgtagcgcacatccctgtagcacacagcatccctgtagcacacagcatccctgtagcacacagcatccctgtagcacacaagcatccctgtagcacacatccctgtagcacacagcatccctgtagcacacagcatctttcccaaatatcatttatggtagttactgcacagacctttctcaagtgctagagatttcttagtgatctcatttatttaaaatgaaattagaggggctggagagatagctcagcagttaagagcactgactgctcttccaaaggtcctgagtttaaatcccagcaaccacatgatggttcacaaccatcagtatagctaccgtgtactcgtcatatacatggtggctcacaaccattcgtaaagagatctgacaccctcttctggtgtgtgtctgaagacagctacaaggtacttagatataataataaataaatctttaaaaaaatgaaattagagtcaatcttcctccctggttaattaatattctttttataataaacataattctattaggatatatatgcatatatgtatacatatatgtatatacatatatgtgtgtagttatacgtatatatacgtatatatgtgtacatatacacacacacatatatacacacacatatatattatttattttgcggtagctattcctggttttcaactcaactatatctggaatgaactacaatcaagaattggagggcatgccaggcagtggtggcccacgcctttaatcccagcactcgggaggcagaggcaggtggattttgggttcgaggccagcctggtctacagagtgagttccaggacagccagggctacacagagaaaccctgtcccgaaaaaccaaaccaaaccaaaccaaaccaaaccaaaccaaaccaaaccaaaccaaaaaccaaaaaaaaaaatataaataaataaataaaataagaaaattggagagcacacctatgatccagatcttgaggctgggagacacaagtttctgacccatatcttgacatggagatcttgaggtatagtggtcattaaaagcttagacccagttcttccagaggtcctgagttcaattcccagcaaccacatggtggctcacaaccctctgtaatggaatctgatgccctcttctggtctgaagagagcaatggtgtactcatatacctaaaataaataaatctaaaaaaaaaaaaaaaagcttagttccaggccaggtagcaaatgcctttaactccaggagactgaggcaaggagatctctgggttcaaggtcagcctgggacaagttaagtggggaaaagaattgctccgccatacccttccctgagaactgtgggaaaacaatgatggtcgcttcaagtcactgggttttactgtgatttgttgtgaagcaataggtaattgagttagttatcaaagcaccagcacggctaacttgtcttggtgtgctgtgaagaggttgcgacagcccaaggattcaagtttccaaagctgactcatcattatgaatgtggacccagttggccagtcattgctctatgcataaggcttaatggaaggagcgcctaacagtcacaagcgtttgttgaatgaatgaatgaatcattataagaatggcaataaggaccccatcagcaggaggttaatttaagcagatttggtctgttttcttttccaaaaaggtactccttcctccaaagtagttgataatctagaagtactgtccgtcttgatttcatatcaatgacactcctaaacctagacacacattatttttcttttattagaagtattaaaacagcaaactatgttcttttgggctagaactggagttaagactgaagtagaagatccagcagtcaaagtgaacagaactaaaattgcttcgtgtgtttccccgggtgacaatttctgcgtaccacagacagcagaggtctggtccgctccaggacaccccgttcactctcgacttgtctgaggctgatgatttcatacagaatagctcttgagacaggaaaggtgacagagtgacatttgcaaaagctttgggagaggtttaggctatgagaagcttatagacaggcttttttttttttaaaaaagatttatttatatttattatatgtaagtacactgtagctatcttcagacagctccagaagagggcgttagatctagttacagatggttgtgagccaccatgtggttgctgggatttgaactcaggaccttcggtagagcaatcagtgctcttaactgctgagccatctcaccagcccctagacaggcatttgaaattttctcttggaatacaggaattgcaggactcacagaggtgccttctggagaaagcatgagcaagtggtgtttgaaagagcaatagtggggtggtaagatggctccatgggtaaaggtgtgtgccatcaaacctgacaacctgtattggatccccagaagctacggggtgaaagcagaggacagactcttgcaagttgccccctgctgtgcacaaatgtgccaggacctgtgcacatgcgccctcatgcgcttgcataaacaacagatagatgtaaattaaaaataaaaagtagaaggagaaatcacagaataaataagaagaaagctttcagagctgtagaagaacagggcagtttaaattcaaagccaaatgtgctagctaatccattatatatctagaaaatgcttttttttgataaaaatagagaagcttgcttaaaaattaaagcgctagactgagctctcttgttgaggggtcagagatgtggggaaggagaaaggcactacagcagcagcgtgctcacacacgagatgcttttgcacagagcctacaacaacacatcaactatttatattacctacatccccttcttggtgtcccacttatcaagggaaagaattttctttggacatctttagcatgtagtaacaatagagttctggaatcagctgttggaaactatcattaaagctggtttatcatactccctaattattctatatagtcagtctccctagagctttacataattctcccttcgttataagcttctgtttctcccttgagtgttttaaatccagacaggtgaggaaatgaagcacttggaaaccagtgtattgtaatatctgtacagccaagcatataaatatatacattttcatatatatatatatatatatatatatatatatatatatatatatataaaattgctatatggactttttcccttttgccctactcacatcctttgagtggaataaagatgtgaaaaactccaaaaaattttaaaaggctgcacagaaacatatttgctgcgaaaggaagtaggggtgtatttagaaactcccaacaaggcctgatgctgtcagcgtggccagctgatgtcagaggggcccacacacctgccaacaccgcgtgtctgttccttcagccctgcagagcagccgagcgaagcagctagctggctttcggctttcttgcctcacttggtggtgcttgtgggctggggtcagcgctgggatgcgcctccttgtgctctatggagtgatgctctggaaacagaaacgggtccttttttttcctccagccaggcatcaggaagcttagggatgaatgtctttctttttctttagaggaagatttccgagcttcttagacgctccgagtaatgtcacgcaagatgcctccagggaagaggcaaaagagggtgatgctagtaacagggactctggggacaggaacgaatgtgggccatttccccttttcaacccacttctcttgatgtaacttcatccttatttttccccacagcagtagtagacactctgctgagcaccacttaggtttttgctgtgcatctcagctaacactttgacattggggattctgtgtaaactagatctccatcttagattaggctgtgtgaaccgaatttatttacatcgttagaaaccaaatagaggcctctcggctattgttctcagattgctctcattggtcatccctgccctccctctactgaccagaaccttgccccaaaacagcctgtaataaacatcaacgctggcttagcttgggctgctatctctggcggagagatctttaaaggatgtatctaaatgcaatgtttgagtagcttcagagagctctaatagaactgtaaatatccccggtttaattagcagtcctgcagttcggtaatggcccatagctctctgagccgagcctcttgaggtttctagacttcagaggctgcctgcaactatgctgtgtggacctatgaaattttccttctcctgtactctaaacccccagctagcctttcctagacacctactcgcaattattgcaaatccataactgactactatcctccggatttctaaaatgatccagtgtttcagcttaggtctcaactcagagatactttagggctcagattggcatcctgagaattaagtcccctgggaaaagaacaataaggaagaaaactctacctacattggagttgatgtcattttttttttccctccaagctcaaggtgatcgcttgctttgtggctggttggtgggggaggaggggctgtacgctagttatcagcatttctgaaccagctctctcaaccgcgacaggtcagccaatcccggcagtaagcttttacttgacaggtttgttctgggctgacagccattgactaggtgctcagataagtcacttggctgagtctacggtaggtggggcgcgctcaccagttcaggggcagtgactggaagtttgttgcaacatcggtaagcctaaccagccagcagcaacaggagatacccttttgccccgcgagtacagatctagaaagggttcacctcattaagcgaaggagatgcgtcaatcccccccacccccgccccgcgcctccccctagggcccggcctcttctcccacggttgggaacgcgcggtgtgggcagatccagaacaggagtctcgtgtcccggccttctggctagctctatgggttacaagcgaaagggaggaacagcttggggactctccgcgtcagcgtgcacaaaccggcggcggccagcagagaggggtggcgggggcacgtgcttggatgtggctgcttgtgtaaccagctccccaggcgctcggccccgacagcgctcctgcggacggctcgtggatgctattctctgctccgatccggcaagagaggggtccagcagaccacacgggagaaggaggcgggggcgatcacctaatagagcagaggggaccaagctcctgccccaggagcacacagataggggaatgggaatttggaaagttccccaactaggaccacacgtgacctcctcctgaaagtagttccgaccgcggctcatgtatccttccacctcgcctttgagccctcccaggcctgctcgccccgcccactcgctggctgcagcttccgaacgtcccatactccacacccgggctcagtaaccgggtcctcgaacatgcaaggtccgacagggtcagaacctggccatcgcgatccaattctgccgggttttcatagcggccacgaagtggggattgggggtgggggcttagctctttgaagactgagcttggctgtgatccggtagacccaccgctgcggggagctgcgggtctcatcaccgggcggtggaggggtgtgtgtgaggtgcactctattcacggagacccactttgtccaaccaggggtgtcctttgggccctggaaactcaggggagatgtgaatgtacacgccccgtatgcacaatcatcatgcttggctgggagcgttcatctttcgggcaaatgaacccagctgcctgggaagcaagaggcggggcagggaaccggagcccgatgaggtgacccacgcgggagacacaataggggttgttctttgtgcaaagactgacaccttgaggacaccgtgagggggagaggtgtgttatctaggtaaagactgtcgccgacaaatcctagcgaagcactgcaatctgaccacagcgcagggcagggaatgaaagccgttccgaagaaacgcagggacagacgcaggaaggataatcctgcccctgaggctcccggagcaccgaccaaggcggtcagctagtgcgatccacctgtgagcggtcagcgattgtgctcagcgcaccctcactcggccccagcctgttgtacctttgccgggtctctctgcgctgaggccaaagccggcgtagctccgggagcgagccgcggacacactgggcatgctccgcggcgttccccgcccctgtcccttccgacgccccgccccgccccgccccgtccccggctcagcgcccgcctcccgcccgcctcccgcctcccctccggctttccgaggcgccctgctctcccggcggggcggcggagggggcgggctggccggcgcacggtgatgtggcgggactctttgtgcactgcggcaggatacgcgcttgggcgtcgggacgcggctgcgctcagctctctcctctcggaagctgcagccatgatggaagtttgagagttgagccgctgtgaggccaggcccggcgcaggcgagggagatgagagacggcggcggccacggcccagagcccctctcagcgcctgtgagcagccgcgggggcagcgccctcggggagccggccgggcggcggcggcggcagcggcggcgggcctcgcctcctcgtcgtctgttctaaccgggcagcttctgagcagcttcggagagagacggtggaagaagccgtgggctcgagcgggagccggcgcaggctcggcggctgcacctcccgctcctggagcgggggggagaagcggcggcggcggccgcggctccggggagggggtcggagtcgcctgtcaccattgccagggctgggaacgccggagagttgctctctccccttctcctgcctccaacacggcggcggcggcggcggcacgtccagggacccgggccggtgttaagcctcccgtccgccgccgccgcaccccccctggcccgggctccggaggccgccggaggaggcagccgctgcgaggattatccgtcttctccccattccgctgcctcggctgccaggcctctggctgctgaggagaagcaggcccagtctctgcaaccatccagcagccgccgcagcagccattacccggctgcggtccagggccaagcggcagcagagcgaggggcatcagcgaccgccaagtccagagccatttccatcctgcagaagaagcctcgccaccagcagcttctgccatctctctcctcctttttcttcagccacaggctcccagacatgacagccatcatcaaagagatcgttagcagaaacaaaaggagatatcaagaggatggattcgacttagacttgacctgtatccatttctgcggctgttcctctttgcttttctgtcactctgataacgtgggagtagacggatgcgaaaaatttctgtagttggggtgactataacgtttaattctgggcgcatttctagatcgtgcatattgtgtctcttccagtgtattcaacctagggagtgttcggctagacggaactcatgcctccttgcaagtgtcaaggcacggattgttttcttgtcgagctctgtggtctcttcttaaaatctattgtccggtaatacagagtactgtacactggattagcgagctcgtcaatccagccttctaaatgaactaaaaaaaaaaaaaaaaatagacgctttgggttgtgcatatttcgattagatcgtgacttgggccctagatctagggtgtagatgagattaaaatgaaagtccgtgctgcacgtaggcatgttgcctcagaatcttgcagtgattgtttttagtttcctgggttgcattggaagatttttctgaaatgtgacttgtggactgatttgcataactttataagcatagtcatcgtcagcatggacggtgcacatttgagggtagaagtagttttgtgtgtttaaaccgacgtaattacaaatttggagcctgcatttggaagttttgtagtttaaaatcaatagtgccagaatatatatcattggagcttttaatagaactttgttaaattagactttctttcctgatgagatgtgggataggatatgaaatttgcatttcagtggtatgttccattcatttgacctcgccacacttgatagaatggagatcgaatagtttttgatcccagatgatgatgtctgtgagtccagggatgcttgctgtgtgtggcaaatgactgcagaggttaaactcagttctcacatgaaatttaagtagtagcgtgaattcgctgctcatattttttgtttcaggtgctctgactcgttggcttatcagtgggttttagcctgatttgtgcagaacgtcaagtataatttagcccgctaatatccagacaaactggcaggaatggatcactggctccagattgtaggtatgctagctctctgcatgcagtaatttactgagtcagcttgttgaataagacagaaacccaagaattttaacgttgtatagttctgattgtctaaaagttaggcctttgtacttcaaaagttcgtggtttaaagcatttatctttgcagtttcaggtatggtgctggttatgatcaggggtaggaaagagagccctcctcttttgcagagtgggaagtgttgacagaaattgagagctttggggaggccagtgtgcaaggtgtgcgaaaacacaagttgcaggtctgaagtgactgagcctttaaatgattgggccttttggtacaacccaaaattttgttatgtgacttgtagcattgaacagtatttagttaaaattatgtaattttataattggtggtaaggtattctttgtaaaaattattttttagttaatattagtagacattttcttaaggtggaagggcagcagcaacttgtctatacatgtcctgctaatagatcactatggagaactttgtttattaattaatttattattttttttgaagaaatattttcatttggaagaggtttgatggattacattagtggcatataaaatgcatagctaattttgattgagttttttgttctgacatgaagatgaaactctcactgaagagctggcttcacacaggctaattttctttcgagctaaaaatacagtttgaaaggaatctttaatttccgagtttgcgttaattgagaagctttactcaggatgaacttgaccaaaagataattggtgagcattctgagttgtcacttgcttcaaggcagtttactgttggtgtgaattaatgttaataatctcgatctagaaggaattagtcaggtatctatttaattaaaaaaaaaaaaacattcaaagaaaagtctagaatgcctggtaggcagacttcttgtagagtccaaagtacacttctgctttgccttcctttccccaaaggacttcaagattattttgtaaattttttttttttgtctgagcagtgacgtgattgcagttccttatttgatttcatactgcatgggcttctgcacgtgcagtttatgtggctgaagaaatccaaagctctccctttagttatggtatgcgtagaaagcagcatcaaatactgcatcaaatgactaataacaaactcttaatttctagagctgtggtttgatggagccaaatgttgatgtgagaacgagtcaggaggggaaaaagtcagcgagccttgctcttctgagaggtgtgcgccccttagttctgagaagctagggagagggcttgcttggttcctcatcagggttttctgtgtttggggcagggattaaaatggtcattgaagatttgtgctggtcagtgttggcaatgaggttggccaagttaaatttcattatgaaagtagtaagttgaatattttcatttgctgaaggcacaattgaattactgtaggaatgtgttggttggaaattattattttttttttaatatataaaactctgaagtctttttttttttaaagatttatttatttttatttatacaagcacgctgtagctctcttcagatacaaaagaagagggcatcagaccccattacagatggttgtgagccaccatgtggttgctgggaattgaactcaggacctctggaagagcagtcggtgtgctcttacccgctgagccatctctccagcccaggaaatttttcttaccgtctggaaagtaggctgaatgtgagacagcaagagttaatgatgttaaagcacagagaaggttcaggtttctggtacagcttttttgtttggtatatttacttttcagatactgaccacaggaatattagtaccttgcagagagaatagtgattattgatattagctcttttgttaaaggcaagtgattgttgcaggtaattatggtttttctttataagtgactctacaaacttcatcttgcctttttcatagtcatttgtgtctttcctgaaaaatacaactagtatagtaagttgcaaatttcatttttcctaaaacttaagaggagtaaagtgcatcaaaaggagtaattttcagttatgtgtaattcaatataaggaaaagaaattttattactgtcaattttagaagtttacacagcaatagagatgtagactgagattccttataacgtattaaataaagattaaatgtttcaagttaaatatgatgaatataatctggttatttctagacatagatttagaaagtggagattcatggcctttaaaaatctttattttagtaacaggagaaaggcagatagtgtattttcatttttttgtgtggaacattatgtctaatttatcataattatataaaatatatacctaagtattatgaaatagcttacctcctggaaatgaattcagttcttatttttaaatgttacaacatgagttgttggtttttttttttttttttttttttttttttctgttcatttgtttatagagtgacagtattttttttttttttttcccgagacagggtttctctgtgtagccctggctgtcctggtactcactctgtagaccaggctggccttaactcagaaatccacctgcctctgcctcccgagtgctgggattaaaagcttgcgtcaccaccgcccggcaagtgacagcattttaagccacttctaaaatagtcactttaatgacttgattagaaaattgttcatgtaggaaaatagaaagtttgaacattcactttagtaaatattcagttttcaatactttatgtctcagtaagctccaaatgtaggcagtgtttttctattgataacttatgtaaattcagagttgacagggataagtttagagtcctgagtatgtaggtcaggttttcatttctgtaggcctattccatttagaagtattctgttctatgaggcagtgttagttattagtacagcttaaaaagtttacttgctcgcattttttgtttttccatgataaactactggctcataaaacagaagtttggctgcacagagctggtggctcgcgttttgttcccctttcttctccctgtagataaaaaagttgattttcagaaccagcgttggagagttggttttgtgatccactcttttgaaaagttacaggacttgttccaaagatcatgatttaggtatgacactttgtgtggttttatcagaagtgatttctgtaaatattcagggtttttttgtagttgatttgtatgtggtagttttgaagttcatgcagttgctgagctattagtgatgttgaatacagattaaatagctttatgttagtatttgctgatttttttttttataggtcttgctgctgttgcttaaaagtgtctaattgtgggatgatggttctcaggtcctgaagctattggcagagatgaaattaggatcctggctttgatgtcttaccttcccattctgtattctctgctatggtttcagaagggacgatatagcagtttcagcttctaaaataatttatactggaacaaaaagcctgtttcttggaggaaggttactatcagagtaaacaactaattttgcctgggaagttttaattacatttagaatagtcaggtatactcttctattgcaacggacatttgtggacatctttggagtactaagacttaacacttgtttgtggtgttaactttggagagatgcaaactgcagttgcacccactaatgacctgtatgtgcgtggtgtggaaaagcttgcaaatctgctgttttgtgtaattagtcaaacagttataatcagaaagccaacgcttaatacgaacagtgactttaacgtaaatatttgaatttttctatgtgtaggcatgcatgtgagtatcaagttaacaaacttactagtctggaaaatggattttctccttaaagaacagactactttggaagccattttaaaccataattgagtcttttaaattacattgaaatacggctggtcttatctatactctgaagttataattatttatcttagttttaggtagacagggtccctgtcttggctctgtcacagagctgggtaactatgctatttaatttctcttagtcttactttacctgaaataaaggaaggataatgatacccaccacaaaagtttatctaataccagcaaggcagaggaaggaggctattgctaattcctaggcagtagccttcagtactacatagtgaatttgaggtccactatagttctatactgtgagttccaagccggctaaggctccatagcgagaccatgtctgaacaagcaacaatcaaatcacatagttaatccccctacagggtttctctgtgtagctctggctgtcctgggactcactctgtagaccaggctgacctcgaactcagaaatccgcctgcctctgcctcccgagtgctgggattaaaggcgtgtatcaccactgtctggatgttttcaacttttaagggaacatgaaaacttccttagttttcacataataactttaagaactatctgttgtaagattaaattttcttagtattcaatatagatgaatataaatagcatgacatttataatatgtgtgcttatatgatacgatacatagcatatatgatctatgatacagttatggtatgcttgtccttaggaggcagagcctcaccatgtagccctggcttgtctggaacttgtggccatgcttggtcagtatcacagttctttttcacaaagagtattcctcaccactaagaagtaggacttcgaatatgtaactcagttatataaactctcaggaaaggtacattagcatttcctttctgctcttccagctcacatacatacagcagacaatacagtctgcagtgagctactataggaatttaaagttactgttaaaccttgccctcagtttcacagtgagccaggattttcagtataactacaactttgaaatgggaagaaagagctagagagatttttttccttcccatactgcatttttaaaaattactcatttatttggggttggggatgggaggaatggaacagggcatacgtttggaggttagagaacagctttcgggagttgattctctcattcctctctttgacactgggaatggcagtcaggttgttagggtagcaggaagtgccttttagccagctgagccatcctagaagctcacatgcttttttcttatctaggggagggaagaacggagtaagcttaaggctcacctacctgcacgtgacagggactagtttttccttcctgtgcttgtggtttcctgggaatggagcgccttaatttccagggctgtttcttatttattttgaaatgcagagtggatgctgctgtaattattcatgactgcgctcttgtaatttttatttattttttgctgagctttccctgagtattttagctgttttttttttttgtagcagattataaaattgagttgcatatctttatatctgaacctatctcactgtctgaacgagtttctatctttctcttctgtctgtgtacctgtactataagcacataggtgttatatcactagaggaccagtgactttcattgcatggtaacactcatgtaggttttcaggctgaagtagaataatttcctccctccctccctccctccctccctttttcttccttcctagtgatgcagacctcatttgtatgtttgttcttgaccctaggagtaggatgcagttactcaaggtgtatggaagggtatgaattctgctttgaaacagcttatcttttaaggagatatatttctaaaagtgaattgtaaaaatcaatatttgtttaacaacgctagaagcaaatttttgctttgaaacaaaatgcagattttttccaataaattttttctctttaatgagactttaaaaaaaaaaaaggttggtttattagtgtatatgagtacattgtagctgtctacagacacaccagaagggggcatccaatcccattacagatggttgtgagccaccgtatggtttctgggaactgaactcaggacctctggaagagcagtcagtgctcttaaccactgagccatctctctagcctgagacttgttttttgaatgttttatgtttctctcaactaaatagaattaaaatttttcttttatgttgagaatgaagtttggggagatattattaaagttgtccttaggactctgtattacattatctcctatcaaacaaaccttaatgtactatattctctgtgtatgtgtgtgtttatagtttataggctagcaatcaacattggtgtctcctctgttgctctgtgccttgtttattgagacagggtctctcattgaacctggagcttgccaatttggcaagactgtcttctgtctgtgccctccagtgctgggatcacaggtgtacacaccatacatggttgtacacaccacacatagctgtacatactatacatgggtgcgtaccaccatacatggttttgacattggtgctagggctctgacctcagatctttgtgcgtgcatagtaaagtactttatccactgagccattccctcagctcccatgctatatactcattgagttaatagtatttacaggtgcattatatcaatagacataagtcctaaataccctaatgtaagaaatatgttgatttgttttgtagacaaggcccagtgaattagaaaggcagcctgctagaatgcaaagaacatagcctggcattagccaggccctggaattagattcctgccctagttcccatctttctaatgaggggtaaagctgtgacttgtaggtgtttctttttgttgatctgaacttttggtaatgtctagaaacattttggtgaacatggtcatacctgaggtgacagaaggcctacttgcacttagtgggttgaggctactgggctcttagacatttgcagaacctgggatctgtttaatgttaggggaagtgtttgatatgtagatatagtacctttgccaaggtcaactgttgctgggtggtaaaaactgggcccacataggttttctgactattgtggggcctttctctctctctccccccccccctctcttttctttcttcctttcttccttccttccttccttcctttcttccttccttccttccttccttccttcctttctttctttctttctttctttctttctttctttctttctttctttctttctttctttctttctttctttctttctttctttctttctagacatggtttctctgtaaagacctggctgtcctggacctcactttgtagaccaggctggcctcgaactcagaaatccgcctgcctctgcctcctgagtgctgggattaaaggcgtgtgccaccaccgcccagcggggcttatgtttcttctaacaactttgtccactaaagatatctctaataagaaaaagatttatttgacaaggtctcatgtcttttagcattttgtgggagtttgaacctctgctgaaatgctgtctttgtcgctgttctgaagagtatgacagggaatgcaaggtggatgtgcagtcaggtgttttgctccttgaagctgaagcaggaggattatttttatgtttgaggacagcttgggcaacctcatactacaccttgagttctagggccaggtcagactgtctcaaaggccaggttcgcgctcacccccactcagtgtttgaacagttttctttgtaattgtttagggagttactttgctgctagtgtctttaatgttactgttgtttaactgcttctttagtcttagatttttttttttttttttactctaaacctttgtttcttcagatggggtgaagttaaatgtgctcatgtgaagaaggggcaggtttctgacaaagaataagaaaaatcatgaaatttttccagatgaagagaatgggttggcctgactgaagttcccgggtgctggtcacctgcttttctgagccttacattggttgttagcctggttactggaaattaccgtgatgctcctgaattgggcatgcgagtttgcattagtccaaagatgcacagaaactaaagcagtaaaaaggacagagaatttcttggtttatttttagggatcacaagcataattataagtgttctaggaatagattagttgctatgttggtttctttttcctgtttaattttacaatttcatttgctgctcactttacaacagaataaaatgtccaaggccttaatttttaatttcttaggaaacttaagtactgatttagagttttggttcttgaagttgagggcagtgtttaggtatgtatactgataaatgttttgaaaccgacatgacttgtcatgatagcttcatattcaccaagaaaagcaaatagtatccattgctactaaatactatccattgctaaattgaatagattaacagtgattaagtctgaattaagagctcatttgcttactaaagaaaattccttttataaagagattactaagagaaaaattttgttgtttgctcatttgttttttcatttcttcaaaacttcaagttgttttctaattcttggtgaactcaaagaggtatcttttttgaataatttatatagtgcttcataattgaaattatcaaaaatacatatttacctataaattaagatttctccatttttttctcttactatttttttatatagtggacttaaagtttcaaatagggacaatttttatgattgagattttacacaaatcacaatcaacaagaacaaaaaaaacaattgaaatattagagctttgaaatgccttcatctgaaattacttctaggccatctattgcacatttaatacttaatgtttatattacttatgtgagatagcacacacacatataatgttatatgttacatataatatatattaaatatttgggacaactttccagtttcctagaccatgctgccctcgaactcattataaacatcccatttttcctgcttctcaagggctatggttataggtttatattagaattccaggctccaaatacttttgatatattaatttcatttattttggagtattttgctgatttgaaattgaaatggaatagaaataatttgaacaattttcatactaaagtgggcatagctttgttgctgtacctttgaatccataattattggcttgccatgatgttacagttgcagtttgaataatgtggtttatatttgtatagttggcttgtatttgttgtactatcaattaatcaatgtgcactgataactagtactagcttttggtgaaaaatctgcatttaacagtttgtcagattttatttttaagtcagatactaaaagagaatctttttttcatagatttttattatttaaatgcattttatatatatcaaacataataatactgagtattttaggaatcaaataatacataaaaatttgttcaatttttatattcatatctaaaagagaatctttaaccatatcagctaaccattaattctttatcaataaattatattaatattttttgtataaacaatttaaaacaaagtgatagaaacatcgttttttattttataaacaaagttactactaggtgtgctctgtggcctgtgaccttagcaccctggagctgtccccaaggaaaccagaagtgcagttactcttggccacattgtaaggtgaagcttagtctagaccaaaagagacagaaccaagacagaaaaacaaattacctgcttattattaagtacgattctttcccaaataaagtgaaacttaagcttgaaattttcatctaggcataaggttgctatcttgggttctaataaaaattagtggtggcaaaaatcttttgttactgttttcttgttgctgcctggggactgaagacccagtcttcagtagctttggtggtctggtttgtagggcatttgatgaaagaacagtattggaaaactgtgaagcactttctcctgcattgtgtccggattgtggtcatgattgcgtgagtttgaaaatatgagaaggtccttagaaagatgtttgtttgttattactgcaaaggtcataggttgtggttgtgccgtgtccagatacccaggcctgccatctgttcctcagatgtaggaaaaagttaaggtaatttagtggtagtaagtggttttgacacctttgtttttggaatcatctaattataagttttaagacctaagattaagttttaggcctttgtaaaaatgaaacttacacagtatgctatcatttgtgcaaaaccactaagggcctgcttcagagctgaagatggctgctccgagcccaactctttactgaagtgtctgcatgcttcagcacaggagtgtcacgtgtcacgtgtcatgctttcacctgacgtactaaattacacaaaatgttggggttttttaaactaggttttctaacacgttatgtaagaattgataatacagaactcagtgagggcactgacttagtaagcagttttaaacatttcttttaagtatttttttcaagccctgtgctttttttctctcctacaacttaattcttaattttcatctgcgtttgaaggagcttcctcaggtaaaccttttctcttgcattatacttgcatgaaaatgatgttagctatgctgtatttaaaatctttaaaatgcctctatatggcttaatataatctgatgagttttgtattatagttggagtttttgatgtgccaagtggttattgtaaaaataatgtctgaagtttaaatatttgaatttgtatttttttttaaagatttatttattgtatttatatgagtacactgtcactgtcttcagacacaccagaagaggacattgaatcccattagagatggttgtgagccaccatgtggttgctgggatttgaactcaggacctctggaacaacagtcagtgctcttaaccactgagccatgtctccagcccgaatttgtattttcaaacccaacttcgggcctggggtctatagtttttgagtgcaagcttcttgtcaggttaatgtctgggaggaagaaggttttgtcagtaaagtttctgaacttttgactagaataactgactttctgtgatgaagactaaactacaggccatgactgcacaggagtcagggcgtacatagatgatcctcagattttgggcagcttttacccaaacattgagtttagaaactgttctccattcggctcacttcgtatttggatagcatggagtattaaaggagttctcattattgtcatttttattgcttccatttaactggtatttttgtcttttgtgtattgagctctctttctgtctcccccctctctgttagggcctcactgtgtaggtctagttggcctgaacctcacaagactcccactgcctttgcctccttgggttacaggagggtgccacctcacttcagccaaacaaaccttgtatgtttcagcactttatttatcagttgaaaatactgactttcttctttttttaaattttagcctttttttctatggctttaaaatatattctttgaacataaggatgataaattacaaaggtgctttctcccacagagccagtaattattttcttataaaaattgtacccctccaatcaatttctttaaaaagtagtttatttaaatgtgcaccaaagactcatttcttttttttccaaatatttttgtattttatatgtaagattgttctgtctgcatgtatgcctgcatcaagtccagtggttgtgagccaccatctgggtgttgggaattgaactcaggatctctgggagagcagccagtgttcttaactgctgagctatgttcccagcccctaaagacttgttcttactttccatctatcaatacagttaaaatgttaatagaaaagtttcatattctaaagtgaattttaactagcatattttaaaatacaatttcacagttcagggaataattttataattcaaagttgattataatgatttaaatgttttcagtgggaataggaatccttttacaatattaaaacaaggcaattataaaatcatcaatatgactctactctagtaatgagtgacagtatatatgtcttcatgatttaaaatctacataattacttccggttcattttatttttcttcagtccaaaacagtccataggggcaaatttatttataccacttgcaatagaaacgaagccatttcatttgatttctatgttagtaatacagggtaaagaaacattttatttcatgtattacatcaaagtcatatgtaaagtgaactaattcagcccacagatttggagtttttctgttttaaatagtctcaaagtctgctttgaagggtaaaattttgactgttaaaagcaactaaaaattttgcaattttggctaaattgaaggagactggtccatcggcaggcaggacatactgcgtgaggaccctgagtctcttcattctcagtgctgaacttgctaaggcattgcaggtgaatgttttgggtttttttttatttttgcaagatgcagctactactaagttaattggcactaaatatgacaggggctttgttctcaagttactggtccatccttcaggcacataggaatatctctcctgtcgtaagttagagactttaatatcttttgaatgattataaagtagctaaaacttagtgttttgtttctaagcagcctgttgcaggagtaacttagaaatctaatatcaaatatgaagattagagcattagagagatatctcttatagctttatgttagtgttgaatcaattacagctttagtttttatagtcttgtgtgtaccattatgatttttctgtagacagtttggagtttgtgtttgccttagttctcataaagttgttaatatgcctgatacatgttgggcttctgcacttttgtgcatattttgtcattagtggtcaatcttagatggcttttttagtggcaagaaaaccaaagagatgccgggctggtggcgcacgcctttgatcccagcatttgggagctagaggcaggcgaatttctgaggccagcctggtctacaaagtgagttctaggacagccagggctacacagagaaaccctgtctcgaaaaaccaaaaaaaaaaaaaagaaaaccaaagagtgttatgcataaaagtgtgtatgtgtgtgtgaaccaaagagacagcgttgtgtgtggatgtgtgcgcacacttgaatgtagtgtaaatgcagtagagctttgaaacaggaaaccagtcttttcatattttccagagacctaggaagaagctaattgttctatataaactcattagaaattaaaagttttagaggctcacatatgtaggcttttgagcagttgcaggtacattatttcataattaacttctaggaagaaaaactgggtgggaaactagtagggatgactagtaagcaagccatcggtaaatatgcccaataaaccttactttggatttcggagttgctgactttaaaaggaacttaataaactaagtaaaccttatttgaaattcagaatacttttttcattgaaaaattgaaagttttattgaaagtttttcattgaatttattcatatccagatataaataagattggaatcacttttaaagagattctaaaacttaaggattcagtggaaaaaaatgtgctggggatacccagggacttccagatgtaaggcagagtgctctaccattgagctatgaaaccattcctttctttctttacttttttttttaaagagatttatttattttatgtatatcagtataccattgctctcttcagacacaccagaagaggtcatcagatcacattacagatggttgtgagccaccatgtggttgctgggaattgaactcaggacctctggaagaacaagcagccagcgctcttaaccgctgagccatctctccagccctctttctttacttttgagtcaagttttccttcactgacccaggctagtcttaaaccctggaggcccagaacttgtgatcctccagtctcaccctaccaaatagctaagcattatatagccctgcaccaccatgccaggttgattctgtttcaaagggtgttactggcacttgggtgtggtgcctgtaatcccagtatttagggaagacaggaggaacaagaggagttaaactttcctgctggcaagttgcagaccagttcaggctaagacacccctcttcccacaaaaagaaagtttgtcactggaaattaagttagttaatgtatatgcttacattctcatgtatgttgttattgcatagccattgtcagtgtttgatacggttttcttttcacaaagagttttttttttttttttggtttttcgagacagggtttctctgtgtctggcctagtatttgtttttgtttgtttgtttttttttttttttactttatttattatatgtaactacactgtagctgtcttcagacactccagaagagggagtcggatctctttacggatggttgtgagccaccatgtagttgctgggatttgaactcggaactttgaacctttggaagagcagttgggtgctcttacccactgagccatttcaccagcccttatttatttatttatttatttatttatttatttattttttgagacagggtttctctgtgtagccctggctgtcctggaactcactcggtagaccaggctggcctcgaactcagaaatccgcctgcctctgcctcccaagtgctgggattaaaggcgtgcgccaacacacccagcttgccctttctttcttaagcattttctttgtaatatgttacatgcatgttagggctttcagtgtcccttgttgaaagcactccagtaatggtaaatgtaggttgttcttgatgtctgctgacttgacaggccatgacgaggcttttccccttcaggctttcccttgttcttgactatgaccccatttatgcatatatgcctgagtaaattgaactacttgacaggcatccctaaacctgtgtctgttttatgtaaatcctgtcctttctgtgtgtctttatgagttgcattgggctcttgttcctggatagatttctgtctctttcctgcagttctctgcttggactgttctagccacttaagtatatcttttctaatataaatcttattttttatgtgtatgagtgttatgcctgcaaacatgtctctttcccgtatgcgtgtctggtcttcactttgatatgggtacagggaaccaaaccggatgctctttctgcaagagcagcaagtatgtttaactgctgggtcatctctccaaacactcctgtgttttcttctgtcaccagaaggcgtgtgtgagtgctacccaacataatactcacttggtgatgcttatacatacttccacggatccctctgaaaacatcttcatttaaaaaatacagtagtacttttagtgccatggtaggtctgtgtgcctgtctttcttgaggacggtaaccactgcccggccctacagactttttaatttgtctcatttattcttgcataatattatttagcctgtccctctatattattcctataagttaacattttttttctcaaaggctttgagagttggtgttaaagattcttggccattacagatgatgctctgcctttgtagtacctatggccaaagccttctcatgacttggagatcaattactgagttatatgtagaaggcaaatgtatccagaatatgtaggcggaggtcttaagtggttgttttaaaggaggtaacttggtatagttgatgtgaaaatcttgtaggtagttatgagatggaaccccagaacaaatgagagctagaaagatggataaaattcatggaagtgtagatttttagttaatcggaaataaattctcccagaatatagagatgggtttttatgttaactggttttgaattgaaactaaggacatgctaaggactaattacactgatgagaagaaagcatgtaggcttgagcctcagtcgcgtattctgacatcacagctgtcagggatgaggttatcactgcccgccgagtcactgtgggcagtaggaacttatagaagtctaaggatagtgagtggctgactgtccaggctatagctcaaggagcagacaagtacatttgacgaccttttataatcacagctagcgtgggaaaagctaatgttttcaaatgcatgcatatttgtgtcattgtatattctaggtatttccttaacttaataatttagatatttatccaaatattattgctatgggatttcctgcagaaagacttgaaggtgtatacaggaacaatattgatgatgtagtaaggtaagcattcttgattttctatttcttatattaataaattattttgatgtgttttatttagaaaagatcccgaaaacacagaccagtatttgcattttgatgtgttttggtaaaactctgaaagttttaacctaaagcacctgacagctctcactcggctggatgcgtcactggatgagaactggctagttatatagtcgtgtttgtttatgtcatgaagatttttttttttgtattccataatatgtctcttaccaggttattctctggcttgtattacagtacaaggttttgactttgtatttgggttaggccttgcttaagtaggtttgtttagttattcaccctgcggtatgagtgaccgatgtgttttatgtagcacttatacctgtagcagtgtttgatacaatgattttggagagacttgctggacattcattcaaaagagtaaatgaagagtatcataattttacaaaatttccaagtgtgattgttgcttagttcagaaaagtgtttctcaaggcccacttaaaaaatttagtttcagaataaaaatgcaattgtatgagtaaatgaacattaaatttttgttgcaaactatcatagtttttaacaattcattaatactgagtcttgctgtatttgctatgctggttctgaagtactttaatgaatttaaaagttaaaattctggattatttcctttttactcataagtgagcatctttcctggtgcttttaactatgtgtgattatgcagatttaaataggtgggagagtgctttgtaacttagagtgtcatgcagatgtaggatgcttttgtggtactgcatgactttatgtctttagatgagctagtagtcagtttcctaagtggctaatttttactgttttaaattgtgcttgtttggataatttattataatattgtttatgttttgttcaggtttaaatttcaccatctataaaagtctaccaaaactaacaccaaaccccttactgctttgtagtttccattaaaccttaggttatcctgttagaggtaactgtttaaaagcctttaacaatagggaaatacatttgccttcttataattaggtagaacacagtggaaggatacttagcatggcaggcccacaggaacacagctcgataggaacacagtgatgatgcagagaaaatgaaatacgccacagaaaaaaagtaagagaggaaattttttcattgaaagttgcagagtatggttaagtggcagtttggccagataattattttctgctttgatgcagaattgtttatgtctttcatgttatgcctcataagatacactatttcacatcaattttatattcagccaaggaccaatttaaccaaaccaaattcagctgtattgaaaaggggagcaagttctttctttaagtggaggggatcttttctggccatgtaatgttcttttgactaatctggcatgctaattttatattgatttctcttaagtatgaattagtaagtgagggtgattagattatctttaaggttacaattccagtttctagacctttacccctggttattagaccttatactacagtaacttagccaaaaatatgttgtgttgaaaaattagtttggtcctgagtcttctggtttcatgattcctatacttttgcttgcaaattaagagaattgcacattcatttttataattagtaactaagacggaaattaattctatctagctttatctatctagtttttttatttagccttaggtgttctctctcttttaaagaaatctatctgtattatttagcttgttcttttagcttcttactttaatgtttttataaaactgttctgtgtttggtttttgttgtttgtttgttaagataaatgaccattaaggcctggataacttctgtttatcagttccccacccacttttatagtaaagtatgaatagtgactagaaaggaagataggccttttcctacaaactaaagtgactaaaaataacttttttgtgatttgtttgtttgtttgctttttttttttttttttttgagatagggtctgaattaagtaagtagccttggctagcctggaagtccttatgtagaactgtcttgttttgaactcataggcatttgcctctctgtctccgcctcggaggactgggatcaaagccaacaccattacattagcccctacaaataatgaattacaatgccttttaggattgccttctccaaagaacacttgtgtctaatatctaaataactgattacttcagtttgttcacactatattggtgatgttagttttaatcaatagtgagtgcttccttttgctttaaagttgataacatctcagtacaagtatttttgttttcatatcaccagatagcccagaagaagcaggtgatgtaagagggggttcgtttgcctcattgtttgagaaggctttctggctgtggagggtgaggagggagggcagaggccctccatccctccatccatggcttcctgagtttggggcagagttcatggtggaaggagtggaggcagtaactcctcatggctgtgaaaggaagcaggaaccagagaaacctgcagataatttgccctgactgactgatttctgtcagccagatttcacttccaaaggctccacaaccgggctgggaggaggatttcagattgaaactataacatgtttgctttcttattaataaactttttttttgcagttaatttttctttgctttgtctagtagggtatccaaaagatattttaaactatttttcttttatctaattccatatttttcttatatttcccccaaacaagaaatatataaaacttaaatctttgctattgtactatagcgttacctggagtgaggtaaacttaaattgcaaatattttcatgcttaaattgtcctatgcagaaaggtttggaagatatagtgtgctatgataagtaaaatttcatagctgagatctacaaaatttgagaaaaatatttagcttcttcatttgagatctgggattcatgtaaaaaatggaaatggaggaacactgggcttggaatttgctttctaattacagatgatttgctttttttaatctaaggagtgagctgacagggcaggcagggcaggagggactgcggaggctcccacagtagttgttgtcgttcctcttaactgcttccttctttttttttttcctcattttttgcaatgaagagggggtgatgcaccaccagcacttggcttgatttgtgcttttccagtgtcctttaggctggtgggaaagctctgtggctttaaatctaagcagtcgtgaacagactggggcatagtgtgtctaaggagcttgtcttgtaatctcttctgcccaatgactcaggaaaatgtagatgtaacagaggcaaactactttttacacaaaatgtttagtacagtgccaccaggtagacctttccccacctttatgttttctcttggtttccttttataatttgctaactctcatcttcctagacagtgtttcatggagctcaatttggaaaatgttgaaaatgaaaaagttatgtgtacagaattgttctaagtttgatatgttttgaggtggaggcatgctatatgacccaggctgacttatgtatagtccatgctggtttctaattcatgatttttacactcctgcctatgggtgtccatcaagcccagtttgtctatagcttttataaggaaatgattagagctcagtcttgtgacataatgatttaacaaaaagctattactgttttgtaaacccatgtataacctgttacaggttcaagagtcttattgtttcttgactgctggcatatatattttctttctgaagaaactttgcaaatgttcaattcttttttttttttttttttttttttttggtttttttgagacagggtttctctgtgtagctttgtttgtactggaactcactctgtagaccaggccggccttgaactcagaaatccgcctgcctctgcctcccaagtgctgggattaaaggcgtgcaccaactctgcacagccctattcattacttaatggccctctgaataatgttttcaagtcttatttttaattgatagtcaataatgatgctagaataacaaatagttctttctcattgaaaatcaagaaaaaaaaatgttgagcggtggtggtgcacgcctttaatcccagcacttgggaggcagaggcaggcggatttctgagttcaaggctggcctggtctacagagtgagttccaggacagccagggctacacagaaaaaccctgtcttggaaaacaaaaaaaaaaaaaaggaaataattaataataataataataaacaggaaagattacttctgtttttccattctaacatttttttgcccctttcctcattttgccttcctcttttccattttaaaaaaattagtgagttaacataatagtcactgttttaaactgtaatttgagtgacatttaatattttcacagtatagccagaggtaatgcagtcaccaccgataccaaattccagaacctttttatcactcctgaaagctcctggctgcccttcccttctgctggctgtctttcctgcacatggggagatttagtgtgttggacaataataatgttatgggcacaaactagctttgctatttaatagcggatactgttttctgtacatttatttatttactatttatatctgttaactattgtataacgagcttgcatataccatcttactaagtttgtagacggaatctaatccctatttcacttttataagtgccttaaaagaaattagaatcttcagttgccacagcttagaagtagcaagaagctggaagttgagtccgtgtctgtgagattccaaagttgattttttttcttttttgtttgttactgtatttaaggcaaggtctcactgtgtagctaaggccagtcttgaactcaaggtcctcctggttccatattctcagagtgctctgtgtataatcttatggtgatctggccagcaaaaattcaatttttaaaaagttttttaaccaggggagggatgcagtctggagtttgaactcagtcattactaggtacttcaccactgggcattacttaaagctgcttcccttaatatcttttttctgtacatcaaaggacaaaatctagaaacacttggacaaatcgagactatacttaaaaatcatgaagcctcgtgcaaaaccctgtatttctagcttatttttaaaagctgaaagagctgtcaaaactgaattcaacattcctgtgtgatggatcaagtatggttgtgtaatgctctctggcattaaattgttaccatttctccattaaggactgtttcttagtgaggtttccattgctggaaatgtgcctggcccaaggaatggcactattaggaggtgtggtcttgttgagggatgtgtgtgtgtcattttggggttaggctttgagaccctctcataactgcctgaggacagtctgctcctggtgtcctttggatgaagatatagaatcctggacaccaccatgcttcttgctgtgataactttcattatattgaaagttgttatattttaataatactgttaatgttttaccttgcctagtttattcaacttcattgataagtgtgtatatggaaaatgtacatacagtttgtcgctgtccaaagtttcaggcagccatatggaaggcgtgtgtatagtgtaaggtttcagctgaggatacattacattccttgttaaaccttagtgctgcagatgttctctcacttccacttgaagggctgtctatagcatttcttttaagttttcgtaacttttgtttctctgggaatatttcaatttatttctcattttttgaaggacagttttgctggatattttttatttctaggaccttaaatgttatattcttacttcctgttctgagggggaaaaatctgctgataccaacgctcctttgtgacatgttccttctctctgtatttgagactgtgggtctttctcaggagagggtcttgcataatacaggctagcctggagtccttgtatatatgcaaggatgtactaactgacttttgatcctcctgcttccacttgactagtgctctgatttcaggagtgcaccaccatcaaaggtttatgtagagatggggacagatttctcagagctctgtttgtgttatccaatgagatatgcccccagcctgtctttgtcttgtgatggtttgattgcgatctgtcttagtaagtctctgagtttttgtgaattgtggttcattgagccagaagttctttatattcttttatcaaatttgagaagttttgactgtacttctgtatataattatttttctggaactttaaagatccctaaggtagtccagttgctgttgtctcacaggttggttaatctctttacgtttcttcagtaagttgctttctgtattttgatatttatcctcctaccctagttcctgggtgtggaatgtggtttactccaggaaagaagattgactttctcactcttggtagccaatagctccttagccggggatgggactttggtcatcacttttctttgcttggcttgtgctttcacaggtcttgtgtatgctgttagggttgctgtgagttcatatgtgcatctggcctgttgtgtctagcaagcgctgtctccttgaagtcacctatcattcttgctcttacagccttcctgccctcttccacatagatgcctgagccttgaaaggaagggtatgatgcagaataccatttgctctgaacattttgaagtctttctttgcaggttgtatgtactaattgccatcaacagaagcttctctgatgagggttgagctgtgcactgtctgtggtttatttagcagtagtcattagcaatcattctattgctgtgtccacttacccgaggaatattggtaggttttccctaggctccatgcccatctagctacaggcttttggcctcattttgacaatgttagatgtggcttccatcttatagaacagacctaaatctaatcaaaaggtggttggttattcctataaacatttttattccacttgactgtacttttcagccatggctaggattacaagtatgaactactgtattgttctatttaaatttttattaagagttttttcatatatcttgatgatattctttcccattcttcaactcctcccaggtcttttcccacctcccattccgacaaatgtcatgttctttttttctttccttctcaagaagaaaaaaaagaaaatcaacaaaacccaataagacaaaaagtgacaaaacaaaacagaaaagcacaaaaaccatggagtccattctatgttggccaactactcctgtgcatgagcgctgattggagcgtagttgatatgttggagaaaactgatcttctgtttctcagtaggaatcaactgcaaatcgtttcttggttagaggcagggctttgtgtctgcttcagatttagtgctgagattttgtttggtttgacttgagcagatcttgcacatgctgaaacaatctgtgagtttgtgtgacacccttgttgtgtctggaagatgctgtttgcttagactcatttactacctctagctcttcccatctttcttccctttcctcggagtagatccctgaaccttgaggggaggggttcaataaatgcatcccatttagtactgagtgttccaaagcctctccatttgtacgctgtgttgatgtatatgcttaatttcatgtgggggttactgctttagatcattcagtttccagataaaaaacacaaacttttaaaaattatttataagccttaatgagcactaaagctgggctggtatctaccttctaggctattagtatctacttccttattggtagccctgagttataacttgccatatttcatctgggccactcttaactccaattggccagccttcatgaccgagttttcatgaatcacttaaccccactgtggcttctcctctctctattgtttcctgatcttctgcctcagaccccaagcctgggaacccaaaccccacctaactctcttcagcctagctataagctgtaggcatcttcattcaccaatcaaggatagctttcagggttatagagcattatttgatgtatgtgaggatcaccttggcccagaggtaaccagggccaatatttagcattacaatatataacaacagaccaaaccttaacggttttaaattaaggtgtaaggtttatacagcaaaggctggtaaatgtgaaattcacttgtaggtctaaatcttttagtacagaattcagcattgctatacatagcaacagaccaaacctcaacacactcttcagttgtgggtctctgtgttaatcaccatctactgcaaaaagaattttctctgatgagtgacacactcatctatagggagagcagtatgttaggaatatttctgtttctttaatagaataatagtagtagtaggttttcccctaggctcatgacttgtctagccttaaattcttagcctcactagcagtggcaggcatgggttctattttaaggaatgggtcttaaattcagtttttaaaaagtggttgtttgttcccataacatttatgccaatattggatcaatatatatgcccgcgagcatgcaggtctttgttgtgggtcacagagtttgtagctgggttatattgatgactacttttatcttccagtcgtgtgcaaaagtaccttccagcaccacgagtgctagtcagtagtgctgaatctctagttggctgtcagctcaatctctctgtgctcgatgacacaagtaagcagtatcttaagcaacaggactaccatctggttgtggaggaaaacagtagccttggcagtagccatgatgttgggattgcaagtatgtgctatcgcactttgttctttttttcaagacagggtttctctgtataccccttgcttcctggaactcactctgtagaccagaaatccacctgcctctgcctccgaagtgctaggattaaaggcgtgtggcaccactgcctggcctgtgctttgttctttatgtgggttctgggaccctaaacttagactaaggtgccttcctagtcctggaattttcctttttaaaatttttttatttgtttttgtatgttggggtgtgtgtgtgctatgccatgccacacttttagaggtcagaggacaacttataattctttccttttactgcatggttcagtttggtggcagttatcttttttttatcttctcagctacccatcttgttaataactcagaagctgcactttcctgcctcagccttccgaatgctggcggacaagtgtgtaccactacacctagctctttgtttctctttcactttattgatacttctgttcatcatttttcttgatcttacccgtgtcttttttttctttttttgagacagggtttctctgtgtagccctggctgtcctggaactcactctgtagatcaggctggccttgaactcagaaatccgcctgcttctgcctcccaagtactgggattaaaggcgtgcgccaccacgcctggcatacccctgtctttcattagctttctgagtatcattaagaccacacaaatctttgcctagtaaatttgctttctggtttttctgagagacagtttgttgactttttaacttattcgatttttgagtatccacacatcttattttggggtgtgagtatgcacacttgtgtatgcatgtatgtttttgtcttggtcttgtaaatgtgtgtgtatgtgtgtgtgtgtgtgtgtgtgtgtgtgtgcatgtggtgtgtgtgtgtgtgtgtgtgtgcatgtgcgcttgtgtgtgtgtgtgcatgtgtgtgtgtgtgcatgtgtgtgtgtgtgtgtatgtgtgtgtgtgtgtgtgtgcatgtgtgtgtgtgtgtatggggggaggtagctaaaaacaatctggatcttgtagggtcgaagatcctctctcttttcttgatggcccagctttcccttgttttctgtattgggtatctactatgctatacctatgcaaagattaccatgctaaactcatgcaaacttaagatctttggggctggagcagtggccgagtgtttggggacactggctgttctcacaactgcctgccaatctagtctgagggtacccgatagcctcttctaaactcgggtggcaggcactacatgctagtggcatgcaagtggtgcacagacatacattcaggcaaaatactaaatacacaaaatcataataaattaaagatcttttaggcttgggctttttttctaggtatagggaatgacttcctaaattttttttgtatgtgtaattaatctcagttgttattatctttaaatgttgggttctttgaaagatccaaaggaaggaaaaagaagtgggcagggcgagtagatttaaaatcccttgatgtcttcagttggtgggcgacagcttcctccatctacgtatgcgtgttcaaaagcagcaattagtgaccagcacacagatttaaaatattggaacgtacggcatttattattaactttggcttttgaaagttgtttgtaagtctctatagaggtatatcaatgactgtatgagaagtccttgttgtataagagctaaaatcagggctgtggagatggctcccttagtaaagttcttgctattctgagttcccattgttctttttttttttttaatagaagaaaaggtttattttactcacagttccatataacagttcattatcaaaagtaatgaggacaggaactgaaacagggcaggaacctggaggcaggagccaatgcagagagcatgaaggggcactcctgactggcttgctcagcatgctttcttttcttttctcttcttttcttttcttttcttttcttttcttttcttttcttttcttttaatattttttattattacgtattttcctcaattacatttagaatgctatctcaaaaatcccccataccctccccccaccaccacttccctacccacccattcccatttttttggccctggcgttcccctgtactggggcatataaagtttgcgtgtccaatgggcctctctttccagtgatggctgactaggccatcttttgatacatatgcagctagagtcaagagctccagggtactggttagttcataatgttgcacctacagggttgcagatccctttagctccttggatactttctctggctcctccattgggggccctgtgctccatccagtagctgactgtgagcatccacttctgtgtttgctaggccccggcctagtctcactgagttcccattcttagaactcatacaaaagccagcttgctcagcatgtttctgcgacctctgtgacaggaagcaggcagagaagactatcctgggggcttgctggccagttagcttagccaaaataactagctccgtgttcagtgagggaaccgttctcaaaaacagactagttgcaaagtcatagagaaatacctgttgttcccatgacacacacacacacacacacacacacacacacacctaaaattgtttaagttaaccttcattttctgtcagagctgactcactgaaagtgtcagcgtttgcctagattccctgggaaaggttccgcaagtgcagtcggtggtcagggctggcttctggggctgcttctctgtcctcttgaactactttggtttctttgtttctgttttgtggggttttttaagatttgtttttgttgttttgttgtggatttttggtaatactttctagcatttgaaatacatgtttatataaaataaatttaaaattcactattgtggcttatctagatttatttcctaagaaatctttcatgctcatacatcagcctcagtttatctcagtgagacagacacacagacacagcacagttggaaaggaggctcaacagggataggagggtgagagtggtgaggcgatgtgagacagacacacagacacaccacagttggaaaggaggctcaacagggataggagggtgagagtggtgagggcgatgtgagacagacacacagacacaccacagttggaaaggaggctcaacagggataggagggtgagagtggtgagggcgatgtgcagtcagttccttcaaggaagatgcagttctaggaggtgtcttaggtcgtgcagggttagggagcattgcctctcactgctgtctaatattttagcctctactatctaaatacatctctgtaggcaagtttgcccatttctctttggaatgtgctgtttcacttgtctttcctcacttgtctttctatgtgtcagactgagagaacagtgggggaagtgcggaatgtgtccctaagtaatcagttctctttgagacagttatccccccaccccttcaaatgatggaatgatgtactgtacccattaaagggctgctttcttctgttagacttgctgttgctcacatgctagctaagaaatcagaatgttcaactgttaaggggcacacagataggatttccctaagcctaaggtaaacacacggtaggaaagactcttgaaagaattatgagtttttagttgcaaatgacataaaatgtctttaccagaaaggaataatgctctggaggaagttcccattgtggaaagcagaagtttaggaaacgtggtgtaggggctacagtctgcttagacaccaatgcatggtcctacatcctggttgctgtctgtgaattcccaggtcttccagtgagatctttgaagaatctactgttctcttgtaccttgctgcccactctgtaggagtgagtgtctcacaacaagggaaagagaaaagaaatacctgcctctgatctcagtgtttgctaactggttgacataagggtggcacaatttccttatgaaatttttatacttcatccccctttcagaaatttgtagctgtgtttacatataagaagccgtggtctttgtttgtttgtttgggtgttcttggactttctagcttccaaagcttcggacagttaacttctgtggggcattgtgtgcatacgtggtgtttactttgtgttgactttcttttcaactgagttttcttttaaattgtttaaactgctttgattccttttgtagacacagctttataatgctttataagtcctttctttatgcctttataatatagcctttataaatcccttctgtgcccttagattcagataaatgttgactaaagaaattgatgggttatattttgctcagaataactgattgctaactctgctttattgttgtatataattactatattttctattgctagctcttaaataatcaagaagcagctttgcttaaattatcaagtagaaaagatttaacttatgaggaattgttaatatatctcctactactgactcggcatttttcttttggacagagaatagagaagtgaaaggtttagggctccctgcctttttcctgtttccagcattatacaccagtcaagcgtatggaattctagtttctttttgttctgttgctccactccaacctttagttgatactgtttttgtgttccttcttatacaccactttgtgctgttctgatttcatctctgagcactccttctgccattgtgatgaccgtgttttaaaatggagctttgtgagctctctgcagctaagtgttttttcctgaataatttgttcattacaaaagagaattctagagaatcctaccaagtccatagcattgttactgtgattgctgttttgagatggtgtccaactctaatcccagctgacttcaaactcagttctatagacctggctgtgtttacatgtgtgcggtggtaacatgcatggcacatgtcacttagtgggcttgacctttctttctctctctttctttctttctttctttctttctttctttctttctttctttctttctttctttctttctttctttctttctttgaatcatcaaagtatgacttcatgttttgtcttttaaaaaattacatttccctctgtgtttaaacaaatgagcctagtttatagttccccatggattacagttaaatcctctctgtagtcttcttttagattgggttgtagattcctaggctgctgctgaggcgaagcatttgcaatgctttacagtccagtatggtatctcactatgccagcatttccttccttgtctgatgtcagctctagaattacatgaacactttccctctgtttcctgacatttccagagttgtagtttccttctaaaaattatttataaaagagaactaaccaaccatttcaagatttttttttttaaagaaaaacctcagaagttaaaagaaccagattcctaatattttgctctatttttcttgtaattttataatgtattccgaggatgtgcccactttggtaacctgactgtgacacaaatgtattgtgtcatactgcttggttttctttctttaattgaaaataaaaaatagatattttttcatacaatattctgattatggtttctcctatcccaactcctcctagtttccctcccttctcccatacagatttacaccctttctgtctctcattagaaaacaggtgtctaaaaactaatagagtgaaataaagtaagcaaacaaactggaataggacaaaacaaacaaacaagaaaaacacaagacccacgtaggctcagagacacgtgtttgcacacatagaactcttataaaatcacaactggaaaccgtactatgtgtccaggagatctatgttctcggttttaatttacacgcacacacacacacacacacacacacaccctgctctgtaaatctcacagtgattgagcacatttggtgctcatcagtttctcgtactcctgggtcttcctgaccgacctaactctgacctaattgccttctgtgtgtgcagcctgaggtaccccttgcgatccttggggtcctcacttcttttacaggttgggctccctggttcccagaaccgattatgatttttcactctcaacatcttttacaactgagatagtgtatgggaaacaaatgacttgttgtagaacagtgcctttattgtattatatactcacccacgatttatagtctgtcttgtatagcattctaggctggaagtaaattttctgaaaaatcaaactttgtataattgtttttaggaagctagtgttaatggcagtgcgtttgtcgttttgtcttatgctgtctactttccatgccaactttagggtctggtgttctctttggcacttagaaataacgtagatatatatggctccatttgcggctcccctagaccccctttttaaagtcaattttattagctatttatgtcttcatcttgggaactcatgttggacctggagatgtaaactgacagaatgttttgctgaggctctaggtttaattgccagcactgcataaacccaggttggtgatacagacctgtagtcccagcaccccagaaatggagggaggagggtcaggaattcagggccagcccgggctacatgaaactattttctccttttgtctcattattaattcttcaccattataccttgctgagtcttctgtttcaggcctgaaggttaaacaaatttacatacataaagtacttaaataatacctggcatgtaataggtgctttggtacctgtgatcactgtgtggtttcacagctggttggaaggagtggcccctgctctgactcttcatttactagcttcacaccttggacaagcttcataatctcttgaggtttacttccttttcctgtaaaatgtaaattccatctctgcgatgttggtcagggacaagagaaagtatacatgtatacatgtgaaaaatgcttacagaactacattgctattgtacttttcagattgtgggtttttttttttttccctgctaggaagattacattttaagcttttttttttttttcatggaagtctgtgagctgggtacacttgaactgctaatatcgttttgtcaagacgtgattgtaatttattagactgaagacatagatatgaaaacagtttttgataaagtcagctctacttcagaatgtataaatctgtgtaatgtaataactattaatgaatgaggggatatgtatttgtgttattaatagtatgtgagataagggtaaataaatctgttttagtcctgtgcagcattaatgtaatttgaaatattagctcatttttgttaatggtgttttttttgtttgttttgttttaaggtttttggattcaaagcataaaaaccattacaagatatacaatctgtaagtatgctttttttatttgtctctgttaaaataactaaataaaagttatttctttgttgaagataaaaatatatttagatatttttatatttgaggaactggattcctgaaaacagttgcagtctgatagagagagttgttgggtctcgaagcgtggtgatgaggtgcagcagcttggcacagcctccggttacttgatctgcttttacagacttggcacctcgcccatccttgagcccataatcatgtgataatttgaaatgtaatccacagcggagctgctgttagtattaacgatggcttctaaggagacagactccagggtggatggacagacttttgtttcctctgtgcttgttgatcaatatactgaaacagctatttgaatattttctgtgtataacctagtaagttatgcagcattgtttagttatctagtataggatttgagggattgctcattaaaacttattggcctatctttaaaccttcactttcttttgacttttggagtagtgacatgaaaacaggaaaggaagacaaatcattaaacaccctttgtctttcaaaaccatttttattttccccaaatactgagcatttttaaaaatttaaaagataaattaccatgtttctattatgtcctttaattttctatgtctatgatttatataacaggagaatgttatgcaatggtagaataccaattagtaattaaccattttctgtagactttatcaaatataactacaagtgttttctgttctgcttcgagtggctatttgaattgctacccagaaggatggagaattttctatgtcttgttatagtgctagatgttacttttattttttcagtctttaatgatatttctgttttgataagacttcaaagtattcatgtgcaatagttaccaatattatttctcttcgcttttgctgacttcagatcagaaaggtgcagccatggtgaaacatgcagatagagtgctcatatggctagttccagccctctagtagcctatagcttgatgtgaaagtaggagggagcaggagagaagtgtggacaaagtaactggccccacaggaggcctctgtaaaagaccagatgtgtgggctgtgattaacttctgataccttctttcttctatccctgcttgttatatacttgtaagactaagaggagtttctgttttatttcttttaattttaagattatttctttgcaaacataaatttaaagatcttgaaatatttccatggcttttctactaatgaaaatcaataggagttatctattagacctgggaggatgagccaaggcaagtcagaagattgatagtataatggtatttgaaatatggcagataactcattttgggcaggtggtggtgtatgctggcttaggtggggttgtgctaataaaaggtggataggagaaccacaagactgtttctgaacagctgcattcagaaggtgactgaaaaaggacaagaactgttgaaagctggaattgatgaaatgaatcatttcagactcacactgtcaggtttggggatttagagaggtcccaatagggaagtagaaagacattagaagacacatttctgcctgagctgaaatcttatgcctgtttaacatatctaaagcacagggaggaaattcttttcattcctgcctatagtgacttcctgcccctagaatttagggattaggtttatgctgtctcctttgttgtatttcagtatagttagaggtggcattgggtggacctaggaacttgatttgagtttccaagcatttgattcccaatttaatgaaccatctctttattagttgagagcagcctttagtgcatatgaacttattcccttgtcatttggaactgaggctttcagaatggcaaaggatctgaagggtccttttagcagtgccttcttatcttatagacagggcattaggcctaggaagttaaatgaggtagccaaagacaggtaggtgcataataacagactacccactgtttgcaccagaatcccttttgtttgctggttagctcttcgttttatttacttcaaaagtttttaaacatatacaaaattgagtgttttaatttgagtaccccctctcccctgcctactgtgtatctgattttaggcaagtgagactagccacaacagatgtttttgttttatttctttttgtcttaggataggaattacaggtagtatgtattttttttttcttggaaatgtagatgtttgaaggtcctaaagtatttttcactggacatctgtatagttagtagtttgtgagaccttttatagcagcagtgttgcacatgaatgaagaactatcagcctaagctttctgataatctagcttatctattattattaatcagttattttgaaaaagggcaacattaattaatcagttttatatgagtgtttttaaaatttctttgttgctccctgttcagagaatacaagattttaagtttttattatattttagtgaatatttgctgtacttggcaaacatttaactgtgttatttttctgttaagatttcctttgtaaaacactgtagagtgaagaagagagctccctaccatgtagttctatggcaaggcctagttgtctgcaagtttgcctttctggtttcactcctcctcttaatttctgttgccaccttgggaaacctcattttccttgttttttttttttttcatttctcttttcatataagccaatttaagataaggacaaaaatatcgtttgagttttaattacaaagaaaaatttaaatccaaattgttatttgctatcttctattttagtatgtggagtgacttactgctaatatgccataagaaatttaaaagaaactccgctgtgaattttggctatataccagagattctaactaaggtggaaggtttcttcttgaccctgtgaccctttctttctcttgagcactgtttcacaggcagccctagcatgtcctcccaaagcccctccgcttgcctataaggagctgcatgctcccctccccccccaagtcaattgttaggtctgtcttcagtgacaaatactgctcatgtttgtgctgtaaaatttgtcactgctttttcatttaagacttgaatgtttctgttatgttgaatgaaactgtaatagaagttgttggatttagttgagcaaggatactaagcttgagttcctgtctcacggtgacttcatgttgttattaggaaagcttttaagggcctttctaaatcttagcttttccatatatacatatgcctcacatatacaatggggatgtaaactgttacatgattgtgagggtgaaaacatggatgtcagctgtaaggtgcccatatcctgtagacttcagttgttactgtgttcctttcaccttaactgatgatacatgacaaccagtttgtaatggtgatcttaagcagtgcttattaaaccaaacttttcagagtgtttgttccatctttctctggggtgggaccctcccttcccctcctctccccttccctgcatcacctccgcaggcaattgggatccctgaccctagaccagaaagtgtggcaaactgaaaaatctgacttgtaggacactaacaaccggcttcttagggtatgtgcctagcttcctcttgtttcctgattgtatccttaattcttgactgtcttccactgtgggctcttcaccacacagcacctctcagaagagcagaacctggcttccctgtgtggagttctaacacttggaggtggagggagaagggaattcagagccagtcttgggtatatgagatcctgactcaaggaaaaccaaagaggaagggaggaaagagaatatagaatatgtgatcttttgtatatgtgtcagttttcttcttcctatctcatttttaggtaagcagacatttagcagagtatttagcaaggatgcatacgtcatctaataaattttctcttttcaaaaacagtacatcaggtaatacactaaaagaaaaacacatgtgtgtgtccgtgtctgtgtgtgtgtgtgtgtgtgtgtgtgtgtgtgaatacagaagttaattcccctcaggtctgctccattgggctgtagtttatggataatttgttcaatctttgtgtgaactgggttttgaaatacagttgagttgtacaaattccagatgcccagtgcaggcccacagctatttatttggaagtcttggatcagttttattttggtacatagaaaatttcagttttcaaaaaactaaaaaactaaataaaacaagaaaatccatatcttttgtgttactctagtatccactgtggtagactagtcggtactcagcaggtatgttggttgaacaacctcagattgggtcctgttcgagttgagattacctatttataactttggagtttgagatttgggctaaggaataatggaactttgttttaaaacactaacttttatttttcagtaatttctttttgtttgtttgtttgttttttttgagacagggtcttgtatcccaggctggcctaggactcactagatagcaaaggctaatcttaaagatataatctttcccagtaactcttctgaagtgctaggattacagcctgtggtaacactcctagcttatttgaataatgcttaagtgtctgatttccttagtagttggagtcaccaggatgcttctgaccccactaatatgtaggatacccttcatagtatcactgattagtgttattattgaaaagctaagtgtttgtcttaatgtgtcagtattttactatcagtgggttttagttattttattgtgatctggtattaaattttgtactctgagagattattggaaatgagatttgtatataaaagagtaaaggtctggcttacaatttttagtaagcattgtgttaataattaaattagtatcattcagttgtcttttacatttcctttgttctttttctttatttttaacatgtatgttttaagtaatggtttaagattgtatgtgatcatctgtcaggtaaagataatagtaagagtagctatttattcataggtatttgtgaaataaaaaatacattctaaagccatgtatagtctttatccaagaaattacagggtcagtgcagttgaatttacagtgttgcatgttgatgtcacaaattctgtgaacaaatatatgcacacaaattgcatgcatgcgtttaacttttattaaagctttggtctccttaattataagaatgataatagtacctacttcagaattcttgaagttaacggaaatagtgactgtaaaaacacttagcgcagtgtttttacatgatagaaaaggtggtatgatagaaagggtggataaatattgctaatattgatactcttccttccagtgtgaaaggtaactttatgccacatttaaactttcttgtagatgtgctgagagacattatgacaccgccaaatttaactgcagaggtatgtataaacataaccacagcatactgtataactaaagaccaatagacttgtcttttactgcctggtgataattatcaagattagtgagataaaaatcttaagaatggcctttgacaattaaaaaaagtgtatttaatgttagagttgttctttaagacctatctattgtcaggaaaactaaatcacagaatacttggagaggtcccaagactaaactaggattggaggtgcttattgacggtgtgggacagctagcgctgctggaaacaatcacaagaagagagcagaaccattttaacttttctacatcgaagaatggcataaagttaggaaaagatgtagcattggtctgtctgtctgtctgtctgcctgtctgtcttctcagaatcatgaagcactaaggagtaagtaagaacagtttctggggaccgacagacctaggctactgctcattaggaaacatgccatggttgaaggtcacttagctttaaatgtacattttaacagactcttgaatgttcttgtgtgccactggggaaatgaggtcgggagcacagttagacagatggttaagtaaaagctggcctgcagcctcttggtgaatgtagtttgccattgtttaccacagagctttcctgtcatggaaaggagtaaatggatggattgttcttgtaccattttacgatggcttgctttaggataagtcagagtttttacatattagataatatggcagataatcagaacagtaatatcaccaggattttttgttttaattttaagacaagggtctcagggtctcagtgtcccagagtgaccctgaactcaatgtttagctgagggtgactttgaacttgtgatcccaattctcctgcttttactcctcaagtattaggattacagacttgcaccacatcctcagttgtgtgtttactcaaggcagggatgagcccagagctgagcatcctaagcaagcactctgcgaactgagctacatcccagagttcataccaggatttaaggatctcaataggatagaatcaaaacagatactagtaagataaaaaccagtagtgatagaacggaagtcttgcttctagataatagcatcttgccttcaaaaacttaactctgactatagagaacaaagacatcttagattcttaattcatgtgaaaaaaatctgaaacttaatttgctataaactttacttcagttgtatgtttttctgtgagtgattaatctcatgtatatggaaatataatgtttgtgagaccattttaaaaacaagtcactgggtaattttattatgggataggaaaagtcagtcttttccatagttgactctattagtaattatactttcttcggagcatgtctggcaatgctgtagtaatatctgctattggtcctgatagaagttactacttgacaagaggcctgggtgacgtgcatttggattcagttgtactgataggctatgacgtgttcccttcatgcacagattcatcctccctggagtgaagagcacaatgcttgtttccatgtctaatgaatgcatttaagaattaataaaagactttctttaaaatctaggtttaattagtaataaattaaaatttcctgaaagttaggcttcttttaagaaccagtaagtttatatataacattttgaaagttaacctatgtttttaaataaaaaatttaaaattttcttacactgggattatctttttgcaacagttgcacagtatccttttgaagaccataacccaccacagctagaacttatcaaacccttctgtgaagatcttgaccaatggctaagtgaagatgacaatcatgttgcagcaattcactgtaaagctggaaagggacggactggtgtaatgatttgtgcatatttattgcatcggggcaaatttttaaaggcacaagaggccctagatttttatggggaagtaaggaccagagacaaaaaggtaagctgtttactttttccttcctccctctttgtggaccaagaatttattgggaaacaggttttctccctcttgctttattgaggtataaccaacaaagtcttaatctacttacagtgtgatgctttgagaactgttatattgtggttgtatccacttagtgtatccctcatccctggtatccccaccctcttccttagctgtactgagaacatccaagacctacctggagtaggtgctaggcacacagtatggattttgatgacaacttgaatgccattacctagtaaagcaaggtatttaatttgatggtaaataaaacattttctgatgggggtattcactagtatagttaactaatcaaagattcattggttattcagaaaactaaagactgttgaattagtggcatgttttgtctatggtacaattgaaaacaaaagcaaattcttggactgctttttcagaggactcgtttagttagtgtaacaccaagattctttgcatgtttttctttctccaagcacagcacctatagtacttcagatgaattgaaagctcagggtagcagtgaaagtgccccaacataaggtcataaactcacttaacctttgagttggtttgcagtcttttttgtagacattgtaagtgacaacatcagtttgcaatgccaagggttggacatggctgctctggggagtaagacatttgaaacttgattctagtattaaatttggacttgtgccccacccccgcttctcttctgcctcctctcccttctgtctttctcctcctctactccattcttcccccttctcctttttttgagccctgattttatctggatcaactttgggccatgcccatcacactaaggtctgtggctgcagcggtcctgggccctgtacttctctttcacctgctttttaaaaaccctgtcgttataactcttttgagtttgtacaagaatatcaagactgtttgttcattggtgggagttcacaaaattacatctttaatgcagtaaaaaagtcatgtgttagaaaatcagatttaagctagagactcctcaactctgactcccgatgaagtgttcagatgttctgttattcgatgtatgtggtatatacataaccataaattgttgttggtagcttccatttgccttcagacaaaatataaaggaacttctaacaaattatgtctcatttctcccatttaaaaaatcagtaccccttacctgagaacagtaggtatctaaatgggttgattctgttcaatagtgaaatttatgataaacaagttttaaaaacaagttgaaagcttgccattgtttgactcttacatcatccttgctctcagtgttatttttattcttgtttagtgaaaataaattatgaaaactcttatttcacctatgagagaaatatggaacataatatgtttttgaccaattaaagtaggctgtgtcagataaaatctctaagactagatacgatcatctattagtttctttgccttcaagatcattatctctgtggggcaggaaaagattatggaccattttaattttcaggttaaagcattaaactgcttgacagcacagcgttgtctggcttctagatatcagtggacctgtgtgcagtgaagagctttctaggtccttctgtctgttgacaaagcctcttgagattctcttgcttgaaggtcttggctctctcttgtgaatttgggtctttcacagcagtaggtttttcatgacaaatcatcagcaggggaacttttcacaactgtagaagagagtctcctaggattaatgtgatcttgctacccagtgcagcagtgagggccagggcagagatatcatccacttttaccagtgcagggaaaccagaggagctgcagggaaagctgctagagtgtggaggactcttagggccagcgatgtgctcagccatttttatttaacttttttacattaagacttttcagttctttgagactgtaataaattatatcatgagtatgtatgtatgtgtagtacaacctgtggatatgtttttagggcttaccatttggataacaaattggcatgctctcttagcatttcttagttaccagtagatctttgtctagggttgaggcttggtcagctttctcccattctggcatgtcttttgttctccttgctcagctcatgtttggtagtcatgttgatgagactttatgggtgtagcttctgacattgccagtagacaatctcacagcaaactcccagatcctctacctcttacagtctctaagccttcgtctacaatggtccctgagctgtaggtgcagttattgtgttgtagatggctcagttggaactgagttccacaactctgtgttttgaactgttgtggttttctgcaatgttttccttatgctacaaagagaaatttccttgatgagggataagcactatgcttatctattggtataaatttagagcatagttatggactatatatattatttagtaaattagtggttgtaggttctctgtcaagaagcatgacttccctagcccaaggtagttggctaggtttccaataccaggcagtttctctgtctttaaggggatttaaaatttttatttgtttatctgtccatccatctgtccatctgtctgaaatctatctatccgtccacccatttaggtgaggcctgagagacagagtcaaggaaatgtcaccatctttaaaaaaaaaaattaagaaggaccctttctttaaaagaccttaaattatttgctgattatttattcatttgtttttattgccatgcataattttgatggaaactttgaactgattacactaagagcttaattactagtaagtggtactcctgatacttctatggcctgtcttgtattttgagagagcaatgtttgctttggagaaatggatgagaatatttgaagtcctgcgactctctcagccatttcctgccaggaatctcagctacttgacatttttttctgtttctgtttgtttgtttattgttgttttgatgttttcatttttctctctttctctcattccccttttgtaatggtaaggattgagcctagggccttgtacatggacacatattctaccagtaagctatatccctcagcccttgtttgactcattcatcatgttaaactacatgaccttttgttttgctttgtttctgtttgtttgctagttcagacaaggattttcacttgagacaaataatggttgtgaaatggtttaggcttctctaagctctgctgtcaatctccattctttttccttcacttcttcagaattgccagcgtgtgtatagagtgataagatgctggggtggtctgtttccttatgttcaagggtaagagcaagacttgggcacttgaactttcctgtaaatttctctgtttccaggccagggtaaatgcaggaatccaggttagacgcaggagtcaagttaggtgcaggagacccatgtcagaaactgaggtcttgacacactagtcattacagcctggtggcaacagttctgtttccctctagaagggaggggagggtgtttgtggaagtgacaagaagtcttgggaaatgttacaaggtagggggtatttgtgagtgaaatgtgaagcctctagtgtcatttggtaaaatgtaataataatacttgtgtcctccatagaacttttcttggcactctccatctcttgaccatttcttccatgtgaaaatgatagactaatggacatagaagatgcagggctgtgcacattgttagagctgtagctggtgcatttgatgtttagccattgcattatactaagactccttaagtaatttagcatcttacagccacatcagtaggatctactgtacctgttgcatagttaatatacctagacaagtgttttggataagtttatacacggacctaaagcagaatccttatgtgtatcctacctttattctttcgattatttaaaaaacaagaaagaacttatgaacagatactgttgaccaagctgtgttttactaatggttgcttttgcattttaagctacaatagtattagaaacctacatccagataaaagctttcagatatccctactccaggaatgcttctttacagatgacatcaaggcccagaaaagtgaactgtagtgatcagaattcgtgacggtgtcaatcagttcatgacagcatttacagtaaaaacaagtcccttggtgtgttgttaaatttctttgtatattatcaagcttacagattctgaactgcaaaaggttccatatttattgctgatggttttgaaaggcttctcagttttatgcttttctttacaaatcgtagtgtttaataaccctccaggttaaaatcttggagtgtttaacctccagtctaagtttaaaatctccagagagagattgctagttttgtaactataatgctgtgcatttccttaaaatttttacaatttaattttctcaaagcttttaaatgtaaagaaaaataaaatcatggcatttataggaagagaatggaactagaagtcattactttaagtaaaacaaatctgatcagaaaaacgtgttttctctcatgggaagaacctagcttggaggtatgcataccctttgggggagggagatctgaagggaagatggtgaaaggaagagtggaacctgctccacacagaaatgcagaagaggaactgtttagggagggaggtgactcagaaggaagtacaacggtacctctatgaggaaatgtcatagtgaaatgcgctagtaacaaagaaaaataataaaacaaaccttaaaaggcaccgggccttgggctggtagagtggctgtggaatgatggatgtgttttagcttgctgagtataggaaagctgctttagtacagctgaggaagtcttcctagaagaatcttagagaattgatgactcagtgtggcagtgtagacacacagtggacttgcagacttgtagactagctaggagtccctgtggctacgttcgtgctgcttgttgtgtttgctgtttctggatttatactttgtgattgtaaatgtgaacttctggagattaatacttaaatctgctttgtagttaatcatattagaattgtctgtattattttgtttatatttgtaattttaactatggagggaccataagaagctgaagaaatttgtgttctggtacagaatcctcatcttctttcttttatgttaaaggaggaggcaattggcctgttgtgaaaaaattgtagactttgcctaaaatgtgtgtttttttttttttggcttttacttatagtactttctttctcagagtcctgtagttaggtcttgatatgatgcaggttggatttgcaagctgaccataaaatgtagcattgtgttcttaatgctggaacaatacttcaggttttgaatattgcaatgaagttcaacagttgctacttcctataaagaaaaaatatctcaagggcgaagtaactgctcaagggaacaaagacccatacccttattcagtcaaagaagtgtgttgcccactttactgggaattatttacttgtatagttgatattttcctttgtgaaaaggtggcaaattatccaaatccaaagtcactgagggtgaatcccgactgactgcacatgcgcgcgcgcgcacacacacacacacacacacacacacacacacaccccgcgccagcccctcctgctgtaaattaccttctggggttggtttccacgtgtgccttgctgtttgcaaatgcacttagggttcagtgctgcaatacatggtttgcgggatgtaaactatgaggagagtgtaagaaagaccttttcagaatggcaatgagcgcaggttttggagtaactttccaaacttgagggaagacactgccactaaccatacgtagtgtctgttctccctggcctccagcagtggcaaggaaagtaaccttaatgcttagttctcttattaaacttaggggagggattgaaacgtttcagtttgccttttctttgcttacaagttggttattaggtaggtgtgtgtgttttgactacgtgagtgtgtgtgagagagaatgtgtgtgtgtgattagtttactacctcagtttgtcaactttactaaaataacaatgccaagcttaattttaagagatttcattattttctgtgagaagtgaacttttataacctactatcaaggttatccccctacccctgttttacttattaaatcccctcatcataaaattttcttgcttagtccttatttttaaatcaaacaagttgtggttgctgttgctaaaacaaaaaactcagtataattttcttgtaatgtcaattatcatgtgttctcttctgatgcatactgtttgggctattatctactatctagcagtccactgattcataaagctgtgcagttttaggctttgaaagatttaagcagttacttaatacaaacccatttgcaaagaccacactgccctgattcatagtctttctttgtcatactcaacacctggcttcctaattttgttccttggattctctctgctgtactaagctctacttaattttttccttttctttttgattcctaaaatagaaaccaacaccaaaaaaaaaaaaaaaaagagagagagagagagagaaaaattgctgttttgaatgtgtgagtttttcagttttaggtaagagaaacccaagtaggagaaggagacagagaagacacaagggagatgtttattgactaatagaacctaaaaggtcaggtctggatctaaatgctcaataagtgtcaggaacctctcctttctacactcttcccttttctttcttggctatgtttattcagaaaggatctttgcaagtaataccaagctatggtcccgtagctttaggcttacactcttgactaactgcagtggtaaaagaacacccatttgactagaggttcctagaataggttctgatttccctggcttaaagggtgtgtctttttatttttttatttttttgtaagatttgtttatgtatatgagtatactgtcactgtcttcaaacacaccagaagagggcatcagaccccattacagatggttataagacaccatgtggttgctgggaattgagctcttaaccactgagccatttctccagcccacatctacctcttttttgaaacaaatacttttgctagtgagtggaatcctcttacaaattcatatatctgaattgaagaataggcccaacaccccaaaccacaaaactgtcattatagcttctaaagaaaatccaggtgaggaaagagtgttggccagaaatgatctgtgtcacttttgtcacagagattctgtaagttaccatagaactcgaagcattatgtattccaaacttcagaggttcttcataaaggggaaaaactgaattaagagaagttatggcttcattcagatcgcatagcattcctgttttcaggtcacctgagtcagattcatttaggtcctgtactgcatttgagcaagataaacatgtatagtcctacttgtttcttattaaagtagaggcagcagggctggcctcagtgtgcgtgggacccagcagttggcaggtagagttaggaggatcaagagtcaaagccaccatcagatcctgcagtgtgtttgaggccagctctcccctggggggaaattgaggttgtaatggttggctgtggtgtcacagaggcctataatctccactgttggagcctgaagcaatagaatacctattttgagaccattctggggtacataatgagaccctgtcttaaaacataagatatgtgataatatataccttgtaattttatgggaataatagaaatatgttttgaatattagaaaatatctacaataactactattgtcatagtattagtaaccacattcttttgtttattgaattactgccttgtttattgtggtcattcagaatgtaggtttttcctcttcaagcaaatactttttaggttgaaacttttatttatgagtttagacttggaaaatattttccagtttattaagaaagtttgctcaaatagaaaattacttctttaaggactctaagttgtgaatttaccttctagaagatcatctagaatctgaatgcatagaggatgaacatacattatatatacatatatatatacacacacacactgtgttgttccgtgctaatcccgtatagtagtcttatgacagtagtatagatctcaaagatgtatgtcctccatataagtctgtttttcaaagagccagccaggcatggtggaacacaccttaaatcccgagcacttgggaagtatgagtttcaagacacaaagaaactcttatcttgaaaaccaaaaagagaaaaagtaattagcatcaagtagccaaggcttataaaagaagaattaatgaaaaatacactaggaaaatgtaaaattccaaggcaggcttttcttatcggaatagcattataataaaaaccataaaactgatcaaagatgtcattttacactcacacaggagacacttcatacggacactgagctgttacgaacgtctgtgccaaaaggagtcaactttgttaagcaaatgctagagaaggaaaataaaaagctagactcggaggaggcgcaaagtaaatatgtgcacactgaagacagtgatagagtcggcacctgagtgctttgcagtgcccacttgcttaggttaataactcaccagattaactacaaatcccacaagcttggaaagtagagccctgttacctgtcttgacagttgagtggaactatagtttgaagtttaattcaggtcattatggaaatttaaagccattttcttcaataatttttgagccatttgaagaaagatacattgattattcaccagtagaaaatgaaacaaaaatataaaggagtgaactgaggaaatgctgaactatttgggctagcaaatcgaacattgactacaagaaagagaactggtgttttttttaatagtgtttagggttaaatctgggtttttgtaactgtctcaaagatgaataatgtagcacatgtttgtgtttagctaggcagttaagtcctaggggtgtacgatgctctggcctcgccttgctgcctaggccttagtatggtgcaagcttccctctgtatcaccactgcctgtgagctctgtgagctctattcacacaactgctgttgatctgagaattgtttacttacatatcaacccagcttttttcaaaaggatgagcatataaatgcttgtgataataggtgtccttcccatcacttgagaatctgtttattgctgtacacaagtgtgaaatgtgtaccaaaagctagagagcaggagaaatgccatctgaacattatcagctactatatttttttgtttattttaacttcttttatataactgaatttgctggtttatcctcatgtaaattctattaaggaggtttgtattattgtattaatttttttaaagaagcaaattggaagtttatattttctcagaattcaaatataagctttgactatttagtatgtgatttttcactctagccaaagtcttaaattgccaatcatgatttcaagtggtttatatccatttttgtttgtttgtttttgtttttgagacggggtctctctttgtagccctgttggcttggaatgcacagagatccaccagcttctttcttcctcctgaattctggaattaaagttgtatactgccacttatccattttgatacacatatggagcagagaaacagagaaagacagagagaggggaagagggtggggtcagagttcatatacctgtatttgctagacatcgtattccttctatacttcttagcttgtatgctgtcttcttccccagcagaagggtgtctgtgtctagagtccttatcacagtagaagttgagaggccatcagtaaactaaagagcattgtaatacctttttcttattaacataaaatacctattttctgcaattctgtttgttgagactgggcctcacataggtcaagctggccttaaacttacgattttggttgtacccaagtaccgagattacaagagggtactgccatgccaaaactgctgtttactttaaactgttagattaaatgcttattatttgccttatattgacttttttactgttatattgtgaatagaaaaatattaactcattagtgaatgaattgttacacatatggtatgtatgtctttgtgtgtgtgtgtctatatgtatatatgtatgtgtctgtatgttccttggatgtccatcctctggtgccatctatcttgttcagacagggtctctaattggtctggaattcaccaagtaggctaggccagcctgtgaatcccaagaatctgcctgtctctgctcccccatgccgaagttttaggcatatatatggttacgtggtaccttaaaaaatgtatataggcatgggctaggttggctgaagtgatagctggtttaaagcactgttgttcttgcagaggacccaggttaactcccagtacccacacaatggcttacaaacatctgtaactccagtttcatggcatgccttctggtttctgtgggcaccaggtatacatatggcaaaacactcacaaaatatttcaagaactaagaaaaaaacatatgcatgggttttgggtcatacatgcgattgattgattgattgactggtttccggctggcctggaactatataaaccctgggctggttcggaacagtcctctgcttcatcccctttagtggtaggattacaggtgtgggacaccattcctggttagggtccccttttaaatgtcatatgaattatgtcttttaaatatttgtaatattttctaagccattttatgcttccctaatgtctgcaaggagtggatatagcacaaggataccgataccccttactgcctctgttaacaagttgtattgaatatgtttatcattcagctgcatactctctcttttccttttttttttggactctaaggtcagaatctcatttttcctgcacagaggcaacacgtttctctagtgtactgattctgatatgattttgcttagaaagtatgtaaacaggtttgtgaagacttgcctagtaaacccatctttgagaggagacttgggtatgtgtagctgcagtacagagaccattgactgtctgtttgaatacacagtggcctttgcttattgggttcatagatcagagcattatttaatatttgaataaatgaggtatttaataactacattttaagaatattcttttgttattgctcttatttattctaatactgagttagatttgattgttagccacttaaaggagaaactttgggataacccagttatagcaattttgtataataactttaatgaaactttccttttgaatttgacttctctttttcttttgtctccctcctccctctgccccctgggcctatcagggagtcacaattcccagtcagaggcgctatgtatattattatagctacctgctaaaaaatcacctggattacagacccgtggcactgctgtttcacaagatgatgtttgaaactattccaatgttcagtggcggaacttgcagtaagtgctctaaattcttagctgtctgtgtgtcggaaaactttttaaaaccatatctaaatgtatatgtaaatgtttagaaatacatttaccaggttaaaaggagtatatttctgaagttggaattaattagttcagttgttcaactcactgggttaagaaagctaacccaatgaattttggtgttctttttttgtttgtttgtttttatgtttttcgagacagggtttctctgtatcgccctggctgtcctggaactcactttgtagaccaggctgtccctgaactcagaaatctgcctgcctctgcctcccaagtgctgggattaaaggtgtgagccaccacacctggcaattttggtgttcttcaagtcaattatatttatgggagaaatattctatgttataaccaccagatgcagtctctgttctgacaaaataaccgagagactcttgacagatcagtgtgagaatctgagagacactcttgacagatcagtgtgagaatggcctctggctacaaccaggtcctcatcagagggaaacatgttcactgtcagagacagaaagagaggagcccttcaaatatagagaataaaagggtgtgtgaattgggatgtgtggagaaaacctaagtgtagctttgaagtcaagctctcagcctgtggcttggacttgtcatctcctcactgagtttgcttgttagtaaaataaagaaatcttggtaagtatgacgtcatgacatcagtgtgtgcttgtagtaatttctcttaccttagtgacacctgggagtggtcagtcatgttttacacttaagatattttatttgtattttcaatataacgtcatagtatcagatgtcacttattagaatcccttgatattattttatggatgtttgcagtttgtcagtgattttagtttttcgcctccatgaaatacttcattaaattaacttgttctttctaaaataatttttatgtagagaatcagtttcttcgtcagataggtgtgattgcccatgagtatggcaactttgttaagggcccctaatttatttatatagcttgttggaaagttctaaggaacttccatactgattaagtatattagtataattttaaaagtgtgagtacaaggcacaatggactattgaaagcaattgacctaggaacttcactaggttcattgagaaggaaaggggataggaactcatgttcttcctatagtttaggcatcaatatagagctgtaaaggcggtatggaggcaatacggaaaagctctgctcaggaatctcactaggtactgactttttgtcagctctactttgcttattgattaaactgctgttgggcttttagtcggacaacattatgtttgcatctctacgcttaaaaaatattgactactaaattctttttaatctttaaaaatttctagttacttatttatgtgctgggatttaacactatatgttgaagttatattaaaataaagctcatgagattcatatgtataaattataactgccatgttcacaaaaggttttggaaacaatttcatgaagaaagtcggtcactggagaacacatgcagtttggattggcattgagtgtgaaggaaatattacaggcagtagaaataaggtgaccgaaacacagcagaagaactggacgagaaatagaagatgtgattggctgtcacaggatcttgaatgggatgtaatagacttggactattggtgtcacgataattctaggaacttcagctgtgttttaaggacaggcccatgttgtatagacagttgtgatgtaggaggggtagtacagccagctctgtgacttggcagatgttgctagagcgatggaatgtactttgtttggattttctttagttgttcatacccagagtgcatttgagatttggagatataaatattatcactttgcttttaagttattttaaatctgatgagatcaaggtacttgtgaggatctgcagtggggctgcagctctgtcttggtggtgtagtgtttttctcaagctagagtgcaggattgccttcagtctccagcccgaggaggaggaggcatgagtgaaacagacagaactagtgataaaaggtttagtgtcttctgcagagggaccaggaagtgtttgccaagcgtttgtcttattaccttactttttctacgtgaagagaagttgctgtataataaaaatgatcagtttgcttttgtgtcaggatgcactctcatccttgtttttgtcaagtccagatcctgtcatttcttcagaacatagttaattaacatagcatatatttcagatgtgcatctcagaagtcaagaggactgtactaatattagaatattgatgttagaacttccatccctcctgctgggcgtggtggcacacacctttaatcccagcacttgggagacagaggcaggcggatttctgagttcgaggccagtctggtctacaaagtgagttccaggacagccagagctatacagagaaatcctgtctcgaaagaccaccaaaaacaaaaacaaaaaagaaacaaacacacaaacaaaaaaaacaatttccaactcaatgggaaactcatggtctataggaggtcgttttgtctcagtggtcttagaaaaagctgctgttttttcattactgtacactacagctggggacattgtcaaggaaagatgccatgacaaggcaattcttataaaagagttaattgggacttgcttacactttcagaggatttgtccattatcaacctatcaggaagcatggtggcacacaggcagatacgctgagagttctacatccagaggctggcagcctctacctcctgagtgccagcacttttaaaagcacgggctaccatcacccagctatacatgttttttatttttttaaacatattatttttattaattccttgagaatttcagataagcattcagtgtatcttgatgtaactcatttcctacttctcccaacagccttgtctagttccaggacagccagggctaactaaacaaagaaactctgtcttaaaatgccaaaaccaacaaacaaaaacttgtgaactggaggtcaaaagaaagatgatcagtattgtatatttctatattataaaggcttaggtttacatcgtttattaaaatattcttgtaaagttgcctctatgcagttcacaaaagtcccaggaaattgttaaagttattttatgcttaaagtagtttgtgatgtgtcttttgcatgttaatgtaaagctttaattgttaatatgctgctagagtctagtcttagaacttactgtttgtgaagtagcaattgattatcatatctgtaatagaactttacttaaggattcagattgaagaagtccttacatgggttggttatgtttttacatattttatttctactgatttgttttagataagcagtcaatatgaagagttatcattttgtgtatatttctgtttattttatcattaaagtagtttttgataagttgaagacatttcttgtgaaatgatcctatatgtatttaaccacacagatcctcagtttgtggtctgccagctaaaggtgaagatatattcctccaattcaggacccacgcggcgggaggacaagttcatgtactttgagttccctcagccattgcctgtgtgtggtgatatcaaagtagagttcttccacaaacagaacaagatgctcaaaaaggtttgcaattcagttctattgtgtagaaatagccattcctcaatgagtaaccacagaccttttgcttaaagcctttggttaggaaattattctgtaaggagagactatttctctgccatctaccaaactgattactcttttgttagattggcagactcttcatttctgtggcattgatgagacatgtaagcagactcacctgccccgacccttagtttgttggcttttttggtttgttctatgttcttatgttgcacaagccatgttttacccatttgggtttatgtttcttgagagtagactattttatattttgtttccccaggttactgagtatttagtcagtactgagtatttagtcagtactgagtatttagtcagtattacttagttgaaagaagtggttgtgaagaagtaatagtaattaaaaaaaaaaaaaaaaacataccaaaaaacaaaagggtggaaacagctaagcatatcctctgtccagggttgctggggcttgagatacacttgggaggaggagagagctcaggtgcagtgtccttggtgtgaacatttatccttggtggctttagtacccttagttgaatgtgaacattaaaatgagtcttaaggtgtagaagttttagctggatcagaagaagataccagttttgtgcagaatcaattcccgtgaagcacatagagcagtacatagtccggaagggggttttataaaaagcagtaaaaggagagcttacttactataaaaccttgcaatgtcagatcaatttatcaggagagataatttcttttttctaggatctacatagctaaagaagaaaaaaaatcacaaagttaaccaaattaatgtttttatcatggacctctcatgaaacaaaaaagctaaatataaatatctttgagttactggtttttttgtttattttctgagaccacaataaatgtgagcaaacatttcaaaaattaggtatttggaaggctttagtttttttccctcttacttcatttgtttgtttgtttgtttgtttgtttgagagacatggtctctctgtctagctctagctgtctcgaacttgttttgtagacaaggctagtctcaaactcagagatcgattgcctctgcatcctaaatgctgggattaaaggcctgtgccatccctgcccgctatctcttacatcttgtaagactctgattcacataagagtgtgtgtgtgctcacacttgtgtgtgtgcgtgcgctcacacatgcatatgtttttctttccttgtttgtttgaagacagattcttactctgtagctcaagctggtctggaactcactaagtagctcaggttggcttcatataaaacagtctttttgctttaaattcccaagacaggagccgcctctcttggctttatattgcttgtaaaaagagataattacctcactgtctccttgtagttttagagatgtgctgtttcttactccagatctctgaagattggatatttataatatatttgtatattttagattactttccataaatttccatttatcataggttttccttactaattatatgcctgttctgatttaaataaaaacagttttagaaaatcagtgcacatcagtgagctacatttgcaagtttaaataatattaccgtgttttcttctaagtaaaatatgattgccaactgaacaactttgttaaaataattgagatcaataaggtttgaaaagggctggaaacacgactcagcagttaggagggagcgctggatgttctggaggacacaggcttggtcctcagcacccatctgttgtcttacagttgtctgtaataccagacctgggggggaatctgagtcctacctcgggcctccatggacactggacagatacaggggccagaaatgtagttgccatagggatcaacttactagggcttctgttgaagtagcaacacctgatctttgtttatatttacatatgcataaactcagaatatttttaaaatccagtattagaataagaagtagttttcttaggattttaagataaaagtaagataccagattttacatgattatattttttatttgaaattttagaaaagataacttagtgaataagaatattccacaaggtgtttgccttcacttaagaatatcaaataatatatggtttatatgttgactatttgtggtacatttttaaataagtgaaatacatcttccatttcttttctgtttaggacaaaatgtttcacttttgggtaaatacgttcttcataccaggaccagaggaaacctcagaaaaagtggaaaatggaagtctttgtgatcaggaaatcgatagcatttgcagtatagagcgtgcagataatgacaaggagtatcttgtactcaccctaacaaaaaacgatcttgacaaagcaaacaaagacaaggccaaccgatacttctctccaaattttaaggtcagttaaaaccatttgggggtgggagggtgtgttttattctgattgtgaagctaagagctagacattgttctagtattgttcaatatgtaacattcccgagtggttgcgtagcctttccttttctgtttattactccacttgctctccttatttcttctcctcccccctccccatcttgagtctttcctctttcctttttcctttttaaattcttttttcattccattgtatttgtttcattcacatgtaacaaactcaaccatagattattatattattattataacataataatactcctaatatttaaaatagaaaatgaccttcacacatgttaagtgaacatagacctaatattcagtgcctttggatctcaagtatgttttaagtttcctttagaatcttcaacttttcattttttccttttctctaaatttacatttctatcaaccacctgcttcctgatttttattttagataggatcttggtatataggctcaggctggccttgaactggcatgtctctgcctcagcctcacctggcaaccatttgcttttaaaatgtatttctctctagttttactgttttaatatttttctggcaatgtgcctcaatgcttgtctaacatgagaaatgccttgagttgaacaccaagtcctacaaaacaaccagtaaaaaaataaagcataaaatagttcgtgtagataaaagctgttttcattgtcactgtaaggtaagtcctatgaagcatgcagctggcaaagaaagtctggtcaagtggatggtctgtaaagagggttgtctgcgtgaaatgggtgcatttaattatgcaaattgtatgcgacctacagaacagttatgtgggggaaggaggaagagtagaaatgagaatctgaggcatgaatgagcttggtatattcagtggctgaagtcatttccactgagtcacaggaacccagtcttgatgtagcagtgtggagtgctgaacacagagaaggtataatctgagctttttaaccttccagttcacttcctaaattgagactggctcagaaactagggagaggagaggccgtggggctgtagtggcaaggagcagtggtaaattactaactttgaagggggatttttaaagcaaatgttggttataagaaaaacttataatgacttgcataatgggaaaagagcaaagatatgatttaaacctggtctctgccaattgttcactagagattgtcctttagcatgtggcctagacttcagggtttttgtttcttaccttttaaaatggaaataacctaagaactgcagccatgcatgtaaaggctactgatcaatcctcacagcacagagtgctctgttagcttgcaccattctctcgtcagatgactgttgtagagctagttgaccttattaatcagtattgtgtagtgtcactaatgtaaacatagagttgtctcagagattgcaagagaaatgtttttgaaacataagcacttgtaaattgaattttgtgatttagtgagttcattgccttcagtttgcacttttatagaattatacagtgcttatggctgatgtattttaaaaatagctttcaactcatcattgtgtcttttgagagcacagtagtcaatcttcaggtcatctgaaaagcagtgcccttcagaattcattttgttatagtactttcaagtaaatctgcaaaacagaatgtctttgctaatacagaactcattctaattgttcattttcatcttaaactttctttctctaggtgaaactatactttacaaaaacagtagaggagccatcaaatccagaggctagcagttcaacttctgtgactccagatgttagtgacaatgaacctgatcattatagatattctgacaccactgactctgatccagagaatgaaccttttgatgaagatcagcattcacaaattacaaaagtctgattttttttttcttatcaagagggataaaataccatgaaaaaaaaaaaacttgaataaactgaaatggaccttttttttttttttttttttttaaatggcaataggacattgtgtcagattgcagttataggaacaattctcttctcctgaccaatcttgttttaccctatacatccacagggttttgacacttgttgtccagttaaaaaaaggttgtgtagctgtgtcatgtatatacctttttgtgtcaaaaggacatttaaaattcaattaggataaataaaagatggcactttcccattttattccagttttataaaaagtggagacaggctgatgtgtatacgcaggagtttttcctttattttctgtcaccagctgaagtggctgaagagctctgattcccgggttcacgtcctacccctttgcacttgtggcaacagataagtttgcagttggctaaggaagtttctgcagggttttgttagattctaatgcatgcacttgggttgggaatggagggaatgctcagaaaggaatgtttctacctgggctctggaccatacaccatctccagctccttagatgcacctttctttagcatgctccacttactaatctggacatccgagagattggctgctgtcctgctgtttgtttgtgcattttaaagagcatattggtgctagacaaggcagctagagtgagtatatttgtagtggggtacaggaatgaaccatctacagcatcttaagaatccacaaaggaagggatataaaaaaagtggtcatagatagataaaagacacagcagcaatgacttaaccatacaaatgtggaggctttcaacaaaggatgggctggaaacagaaaatttgacaatgatttattcagtatgctttctcagttgtaatgactgctccatctcctatgtaatcaaggccagtgctaagagtcagatgctattagtccctacatcagtcaacaccttacctttatttttattaattttcaatcatatacctactgtggatgcttcatgtgctggctgccagtttgtttttctccttaaatattttataattcttcacaggaaatttcaacttgagattcaacagtaagcaggttttgttttttttttttcctagagattgatgatgcgcgtcctcagtccagtggctgtcagacgttcagcccctttgaccttacacattctattacaatgagttttgcagttttgcacattttttttaaatgtcattaactgttagggaattttacttgaatactgaatacatataatgtgtatattaaaaaagtcattgtttgtgttaaaaaagaaattagagttgcagtaaatttacagcactgcacgaataataaggcattgaagtttttcagtagaaattgtcctacagatgctttatcgacttgctattggaagaatagatcttcttaaatgtgcagtgttgagtcacttcgttatagtggtagagttgggattagggcttcaattttacttcttaaatatcattctatgtttgatatgcccagactgcatacaatttaaagcaagagtacaactactatcgtaatggtaatgtgaagatgctattacaaaggatctcctcccaacccctcgggaatttggtgtctttcaaattatatcttgaccttgacatttgaatatccagccattattagatttcttaatggtgtgaagtcccattttcaataacttattggtgctgaaattgttcactagctgtggtctgacctagttaatttacaagtacagattgcataggacccactagagaagcatttatagtttgatggtaagtagattaggcagaacgccatctaaaatattcttagaaaataatgttgatgtattttccatacctcatcagtttcactcaaccaataaagtttttaaaattgtaacaaagctcttaggatttacacatttatatttaaacattgatacatgaatattgactgactgttgataaagtcagagacaacttttcctgagatctcaccatggaaatctgtacacccccttgtctttcctaaaagctgaaagtggctgactaaaatgcaaagcagctgttgatgttttgaagatagtgataaacactgttctttgttagttttgggcacagcatgctaaactataacttgtattgttccaatatgtaacacagagggccaggtcatgaataatgacattacaatgggctgttgcactgttaatatttttcctttggaatgtgaaggtctgaatgagggttttgattttgaatgtttcagtgtttttgagaagccttgcttacattttatggtgtagtcattggaaatggaaaaatggcattatatatatattatatatatataaatatatatattatacatactctccttactttatttcagttaccatccccatagaatttgacaagaattgctatgactgaaagggttttgagtcctaattcaaactttctttatgacagtattcacgattagcctgaagtgcattctgtaggtgatctctcccgtgtttctggaatgctttcttagactcttggatgtgcagcagcttatgtgtctgaaatgacttgaaggcatcacctttaagaaggcttacagttgggccccgtacatcccaagtcctctgtaattcctcttggacatttttgccataattgtaaaagggtagttgaattaaatagcgtcaccattctttgctgtggcacaggttataaacttaagtggagtttaccggcagcatcaaatgtttcagctttaaaaataaaagtaggttacaagttacatgtttagttttagaaaatttgtgcaatatgttcataacgatggctgtggttgccacaaagtgcctcgtttacctttaaatactgttaatgtgtcgtgcatgcagacggaaggggtggatctgtgcactaaacggggggcttttactctagtattcggcagagttgccttctacctgccagctcaaaagttcgatctgttttcatatagaatatatatactaaaaccatccagtctgtaaaacagccttaccccgattcagcctcttcagatactcttgtgctgtgcagcagtggctctgtgtgtaaatgctatgcactgaggatacacaaatatgacgtgtacaggataatgcctcataccaatcagatgtccatttgttactgtgtttgttaacaaccctttatctcttagtgttataaactccacttaaaactgattaaagtctcattcttgtcattgtgtgggtgttttattaaatgagagtatttataattcaaattgcttaaatccattaaaatgttcagtaatgggcagccacatatgattacaaagttcctgtgcatttttctatttttccccctccttgctatccttccaagcaaagcatctttctgtcatcttggtagacacatacctgtctactcatggttaagaagagcactttaagccttagtcatcacttaataagttattccaggcacagtaaaaagttcaaggttcttggaaaacggtgcttatttctcttcttataagccagatgtctgaagatagccctaaccccaagaacgggcttgatgtctcaggtctgttctgtggctttctgttttttttaacactgcagttggccatcagcacatgggaggtttcatcgggacttgtccagagtagtaggctcaaatatactatctcctttctaatattcttaaaggctaaggagtcctttcaatataacagtaagataacttgtgatgttttagaagtaagcagaccattaatgtcaatgtggagtcttaatgttacatgaagttgatagtttctctgtgacccatttaaaaatacaaaccgagtagcatgcaattatgtaaagaaatatgaagattatatgtagtcacacattttctttagaattcttagtttggtgaaaacttgaatataaaggtattttgatttatatgacattttgatgatatttgaaaaaaaggaatttcctgacattttgcttttagatcatgtcccccattgtgctgtaatttaagccaacttggttcagtgaatgccatcaccatttccattgagaatttaaaactcaccagtgtttaacatgcaggcttctgagggctcccggagaatcagaccttaagcccagttgatttacttctaacgtgaaacttcgagttcctgtatactttgctagataatttgtggtacatctaaagcttagtcttaagtggcttgtgtgtggattttattcaacattcttgttgctagggtagagagaaatgttgctgagtagaaacaagagtacccagttcaatgtggtacagagagcagtccctaaaatctgtacacagtgtaatggaccactttaggagtcaagaggctgatttttcctatgaaattacattgcaacaggaagccttctagtatagttccttttactgttagaatatgtttttatgcatacgctatagctgctttcccatcttccaacaacaggtatcaggatgtaagcaagctttaaacagtgtgaagatggcaggatagtgtcatcggtaacagtcctctgactctaaatgtagttgctctgtaacactttgtgaatataacatcacaattctcatgtccttggggggggggggcatacccagtattagtatgttttagtgactaagcaatcatttttctgtttactcatgtacattttctctttaaaactaaaacctgtactgtgtatgtctccaaagccttttagcttagtttttaggaaatgaacactgaatggatcactttttagtgtagcaggtatgggatatgtgcattatagagagaccttgtcagctctctgggcctatttgaatgtttattgttggtgtgaggatggtaggggaatcagtaaatacaagttacgttggtttagcagagcaagctcagtgtgggtatttctctttgaagcgtggtgcgtgacgcactgtgagtagagaatttggtcaccctttgagtcctcttgcattttgcaaacttgctcagcaaatgcgtacctaccttgccccctaggtaaaagcaggaactactactgatttatctgtcactcagctgtctttatatgtgtgcttctgtgacttgtatcacacaagaatcttaaagatttcacaaattgttaccttttagctctgaatgttgagtattctggtgggctaacaacaagacaaactcttgacagtcatttgagaattttcatgaaacatttagctgaaaacattttataatttatgaaaaaaatgtgttaccttaaacttttacatatgtgggagacattaactgccatatttgagcatactgaattttaaatttaaaataaagctgcatatttttaaatgaaatgtttaacaaggattcatattttttgttttttaagattaaaaataatttatgtcttctcatgtggaacctcatctgtcacaatggttagattatacagaatggagcaaggcttgtagtggtttagcttacagtaaaattcttaatgtttagatgtgtttacttactggctgttatgtatacttttgagattttccacctgttctgtgtagttttctaaatgatactcctacttaaaaacagcattttagtatctattttctgtctccattaaatggtcctcattttctattgagtttggaagtgtgcacattgtgtgtgtgtgtgtgtgtgtgtgtgtgcacacgtgtgcgcgcccgtgcgtgtgtctatttgtggagtttgtatgggagaattagttttgaaagtgctagaatagagatgaaatttggttcaagtaaaattttcccactgggattttacagtttattgtaataaaatgttaattttggatgaccttgaatattaatgaatttgttagcctcttgatgtgtgcattaatgagatatatcaaagttgtatattaaaccaaagttggagttgtggaagtgtttttatgaagttccgtttggctaccaatggacataagactagaaataccttcctgtggagaatatttttcctttaaacaattaaaaaggttcattatttttgatgatttgcttcttagctttttattcatccgagaatcaatccctgctatgtgtaacaggtatttggactatattacttagtgaaagaggaacatcctgatcttactgttgaaaagtttatacttcaccagagtaaactacgtaaaagctgtggggtgtgctaggaagtatgagacctcatggctcccttgcatgtccatcctcagagtttagattctgtttactagagcattactagagtgaaatagccatgaaagtgcagagaaacttccaagtaaaggcagtgagagatccctgtaccctcctgtctttttccttccctagtgcagtgtcctgaagtgtgtcctagtgtgtgtcatggctctgccagcccaggtcttgaggtaacacctgcagtggagctcctgagggtcttcctctaccccctttcaacacaagcaagaaacaataatattttgggttgctattctaaccaatatgctttgaaaaacttagctttcttgagcagcaaagggaattaataataaaacccaacatatttagattagtttgtccaattaacaggatgcaagatgtccaaatgtttttttttttgatgagtagttattgcggtacgtcaggcattgtgaacgctcggcatgcacttgggtgaacagcagtttcctgtctgtgaagtttgcattctagcaagaaaaatagagcaaagataaatgtgtcagctcacctcaagcagagtgacttcagtgttggataggttatttgagagtggcttcagcaggtgtggggggtttcagtagactggtgcaatttgtacccagaaacttccacaaaactttactcagacttggagtttgaaaatgtttagtatatctaaggagaatttatagtaacctcatcttaagtagccatgaccattctgttgtctaaattggtttggtaaagcctgtttaaacaattggttcctctttattctcagagttaactttttagtgttctctgtgtatgtttcaaaaacactaagtcatttttcagaagttaaaggctctattttgaccttaaatagttttgtaatgttgaagagtcatgccatttatgatttgttgttggacagtgagttataaatgttgagttactcaggatatgggtgtgatttatgacctggtgctctatgtattagttcctaacccataaccaaacatcctgaaaaataccattatctaagtatcagaagcagcatttccacacaaagataaaaatccccacctctcctgcttcatctcaaagattgaagtcaaagtgtttaataatctgctacaatggacacttgaaacattttattcattacatcattaacattttagtagtggcagggtccactcctcagatcaggcccaggactaaggggtgaggtcttttatttatttgtttatttctgtgtatacacgttcacatgtgtgggagcatgtatggcacgtgtatgtatatgtgggtggagtcagagcttaatgttagttgccttcctccatggctattgaggaagccatctcttcctaaaatcttcctaaatctcttcctaaacttggtgcttggtgattcatctgcaattacagttggatgtacagcccagcatgtagtgttgggatcataacactagtcctcatagttgcaaagcaagtactttgctcagtgagccatctccccagtccctagggaggaaatcttgaaagaaaatgttgactttttttttttaattcttgattttaaaataggtttaaaagaatttgatagtcatctatagatagaccatgaatctgagcaaggagaggtatataggaagatttggaagggaggaaggcaaggggagaaattatgtaattaaattacattatcgggctggtgagatggctcagaggttaagagcaccgactgctcttcggaaggtcctgagttcaaatcccagcaaccacatggtggctcacaaccatccgtaatgagatatgatgccctcttctggtgtgtctgaagacagctacagtacttacatataacaataaataaattaaaaaattacattgtctcaaaaaataagaaaataactaaaaattttaattttacttaatgttttcctgtgaatattattgataagaaacctttttgtgtggctgcctttaacagaggagccacaagctatattcttgttacttattacgtttgtgtgtttttgtatatgcaaatgtttgccatgatactccatgtaggttaagaggacaacttgtcaggagtcttttttctccttccactatgtaggtcccagaagttaaacttaggttgtcaggcttggtgctcatctcctgagccttctcatctgcccataccaggtattctttagcaagtacttcagtaagtacagccattgtaagtcacaagagcaattagacttcttcatggtagaaataattagctgatggaaagattatattttaggattataaatgttcttggggggggtttgtttttgtttgggagtttttggtttgttttgagacagggtacttaggctggcattatactcacgatatagttctggctgacctgcagcacatgatcctttggcttcagtctcccaggtaagaatactggaattacagatgtgttgccaacacctctggttattagtgatgtgtgtgtgtgtgtgtgtgtgtgtgtatacacacacagtgaatgttttactcttttggtaaaaatggaggtctgaggtaaaagtttcctatgtcagctgtccatagggaagacttaaaagactttgcttcaaaagattgagggctggtgagatggctcagcagttaagagcaccaactactcttccaaaggtcctgagttcaaatcccagcaaccacatggcggctcacaaccatctgtaacaaaatctgatgctctcttctggagtgtctgaagtacagctacagtgtacttacatataataaaaaagtaagattaaaacaacatcaggatgaacatgattttctcaggtataaaatggtggctaagaggtacttggaagtctcaagcaacttgactgaatctccaaaaacttaagtaagtcaggttctttacctggaaggcaaaacagcagcacagggaggaaaaaaaaaatcaaagtactgaagcagaagtaagaagagaatgtgacgcaggaaagaagtgaggagagcccagactacacaagagggaggccagagccacagcggagttgtagcctggtggttctgagtctgccctgggtgaaaagcatatttcactttcctttagggagaggtgatttcattcctgaaaccttaaaaacaaagtatccaacttcacagctaggtagtaaggaattggatttgaacccagcatagtctgtggtttcttccatagtatgacacagtctctctctgtttttttgttttttgtttttttttttttttggtttttggattttcgagacagggcttctctgtgtagccctggctctcctggaactcactctgtagaccaggctggcctcgaactcagaaattcacctgtctctgcctcacaagtgctgggattaaaggcgtgcgcaaccacgcccggctggcactgtctcttagagtcaaatgcgaaacagttgaaaattgaagctctgaaataaattgtatcatggagtcactggatattcttcatttgttagaaatagtaaaaagaacaaaccagtgttaggtcttgccaaaaaaaaaaaaaaaaaaaaaatggacatcaaaaataattgcttaggtactggggaggtggctcagcagttaagagtcctggctactcttgcagagggctcagatttggttcccaacaccccaatggcagctcacaacctatggaactcaagtttcaaggaatccaacgaatgccctcttctggcctccatgagattgcatgcttatagtgtttcacatacagtgcgggcaaaatactcatgcacataaagataaatctttaaaaaaaagccatttaattcaagccataagagtcttgacagggtacattggtaagttatgggtatataatggtgtgtatcaggagacagaattggagctctgacttgctaatgcggtgtgaaatccattaaataaatgtcctttgtttttgtttgagctggaatattcagattggtggatggtgctcagttaacttccactcagcaagtctgttatgtgcctccagttagaatcaccctagtgtagaagctagagaagcttgtagaccatgccgcgggaacagcaagtgcaacagtttgatgtgggaacaaagctaggacaccatgaaaggaaggcagagcagatcgtaggataaaatggtggaaggtgaattttggagaaatactcagaggagctcatggactgatcaaagcataataaaaccactgaatcattccgcacagatagcaactaagaatctctgcaccaaccaagggtttgtgtgactctcctagtcccacactcccctctccggccatgctaactgccgttaggtgtgtttgggggtggggtggggtgggcggggcatctttctaacttattccatgctgaaagggagaacagagaggggcagccatcagagtgtctctcaagagggtcaataaggagctttgataaacttaactgatgatcctgaacataaggcaaccattggtgactatgcatcctcggagctagctccgtgagcggcatagagtctttaacacactgttagtactattttaattcctattgaaaaagtagtccagaaaattgttggagaagctgagtgtggcagctcgtgtcttcaatcctagcccctgggagacagaaacaggaaggtctcagttcaaggccagcctggtctatatagtaatttccaggtttgtcagaactatgtagagagatctgtcggagaaaaagaaaatgccgtgggtgattatgccccatttagagaaagatcacaagaaccttagtaggctttgtcatcagtaagatgctattttctttgccaccactgtccattgcaagatgtatatggtggagcaaactggtagtctggcttgggtttgtctcaaacccaagcctttaattagtttaaatttagaagttggccttttggtttcttccatcacagcctcatggggggttaagaaaccaagttaatgaagaaaattccttaacccgatgagtaatattaagacttacttagtaagacagaatgtaaatcgtgcagctgactggaccatgtgccaaaaccctgtggaaagagggggtcagagaaaaccgtcttctctacatctagactgagtgaagttttgcttgagagatctgagtctaactgcaactggctgttactccttaggcctcggagccctgcctaagaagtggatgcctgggaactcctccagacttgtccaagtaattttcccattggcactgcccacctagggaaaggggccaaaaacagataagaaagatggcaagcttcaggcttctttcccacactcctgacctgagacaaaggcctaagggcctggtgggctttttcttctgacaatagacccccttgctggtaggctgttctgacaagttcaaggctgaggccacatatgggcacattagcctctctccttgcttttgttcaatctgaccaggcctaaattagcagaggaagactattcaaaggccctcaaaactcccagccctccataagaaactggacttcagtgtccccagtcctcctctaactttcagaggttctttctctgtgtctcttaccatgtgtttcctcgcccctagtaaaaaccttgcatcagccattaaagaaaatctccccatgaaacatgaaaagtaactgtagggttaaacaggcataggtcttgttccttcatcttagtttttcaacggagctgggacccacatatagcctggtacagcaggggtgttatgattagctaaaatgggaatcctgttctctggctgggggttgggggcaaaaaaaaaactgatacaagagccagagagcatagtggggctagaggtgggtcactggggaaaatacagactaactagaaaggaaatctttacttccaatttagggacttccatgtacccgacacttatccccaagggggatgggtatagagacagagcccagggaacacgcccaaagtgtcaaacatgaaagtgaaagtgatggagttcccactcagaggtgagacacaactcacaatctgagtttaccagttgatttcattcatccacctatccatccatccaatgcttttctgaaaattataacaggacctttgctgtacacagtacgccatccaatgtttcctaactgggaaggactgggaaaatgagagcaacaaggaaaaagacaatcaagcgatgccaactgcagatttcccagatggaaatgcttagactaagtcaaatgacagacaaaaacagctattgtaatgattgtgttataatcatattgtaaaatgattagaaatatacaactaaatggaaagatggtctcagcaaacaaaattacgttatttctaaaagatatggcatctgaaagaagaaaagaacatacaaaatggacaattcaagagaggctatgaagagcctagccagtagatgaagagaacttggtaactatccatcttaagagcagcttgagaatcaattgtcttacttactcactttacatcctgctcactgcccactcccagttagcccctcccacaatacttacctcatcccctgtcctcttctcctctgagtgggtggggaccccctgggtatctccccaccctggcacaccaagtccctgagaggctaggctcttcctctcccactgaggccagacaaagcaactcagctagcagaacatatcgcacccacgcacaggcaacagctattgggaccctctcccttagccccacctcaacctcactccagttgtccaggacccacgtgaagatcaagctgctacatatgtgcgggaattgcttgataatcttaaagggggggctgtagctttgaaaagcaaaaatgtatctgagtgtaattagctacagagtacttaatgaaacgctaaccttagtacttttatgtgcttgccacagacacttatgaagaagctcctcctgcttgtcagctgccttgagtaaggaattagcatcatcataagccctgccttggtgatggtaaaaatttcctgtaacgatgctgtatagccttaaagcaataaagcatgctcaatgctccatctacagtttcctggttggatccattcagttgttgtctacctgcagtggaaggaatttggaaacctagcgactcaccactagatcatggtcaaaattcatctccggaattggtacccaatggtagttttgcttgctggctatggttaactctttgatgtagccttggcagtcagacctttaaaaaaaaatgtcatacagaagctaaccggtcatgtagatataatgtatgcttttcaatagaaaatataggagaaaaaaggacagtgttgcactggttgactaagaaaacattaagacatgtttgggggaaaactgagcaataattgtgtttggagaaatggcttcctaatttaggagtagagagtttcaagaccttagagtaactctcattggtatattagaaccatataactttcaaagtctttcttgcttttttaactttttaaatgtattttttccagcatatatgtctgtgtattacatgatgatgccagatatccacaaagcccagacagttgtgagctgtgttggtcctttggaagagcagcctttactcttaacccactaagccatctttctagccccccaaaatgtatgttttataaatggtattcttttaatgactgtgctaacatttgcttggaatattccaacggttgcatttaattcttataaaataagaagtatgttctatttctatctatattatacatgtggatcagaagaataggaagggttaataatctgttgagtgttgcagacctggttcctaggatctaaacccaagaattatagtttcaattttgctgaagccacagtctgccttttgtagtgctgttgggatatgttagaatctttcctacgtgaagtctaatgggagaacattacattgcatttggggtatacccctgaagagaccctttcctgtctgtcccttgcttcttggccattgtgaacattcctcctccatcatgtattctcaccatgatgcatgtaaactaaaatatagtttaactccttttaagttgattactatctcaagtcttttgtcacagtgatgggatgccaaataatgcaagagggccatttgatggccaagcctcggttaattgtgtatgtgttaattcctaaagaaagtagactttacttccttaacaaagtagacttcttttaagagcataggcttcaagctagaatgggtagaattgtgttgtcacttgtggctctgaaaccaagttctcggcactcctttgcactgttgtaatgtctaaaagcctttaaaaaaaacctttgttactgatactaaacatatttgaaactaaaacaggtaggtgtgtgtgtgtgagtgtgtgtgtgtgtgtgtgtgtgtgtgtgtgtgtgtgtgtgcacataaatatatatccaggcttcaggctggtctaggactcactatgttgcctagactgacctaaagccataatccttctccctgtcttggtttgcaagagcttggattactggcaaacactgtccagctagttcccgaaaaggtagttgcaatatggaatcagaaaaccatgatgaactttttgtgctactcccttttcttgctctataaatagatcagtgctcatgttcatttttgttacttcatgcattaattattcgggagaaaatggtttagtgagcaatacggattttggcaccattctctagaggaatagaaccaacaggatatatagttgtattatgaaaatggattcagtagactggttgagagactatgggatgggttcaggctagagaggctgagagcccaactcagtctaggaagctgggtgtctccagccgtccccatctggtgctgatagcctagcagattcctggagagtccctggtcttgaatccatgaggaatcctaaagaagctggagtctggtggaagcagaagatgtagcaagcagcagcagaaagagcacggagccatgcaggtaggcaccatttgggtagatgccatggagataggtgccatgcatctaaggtcatgcagataagcagacggtcttaacctctgctctctataacctgaaggtgccgcccactcaaggaggctcctttttccttcagttaattctttctggaaatgctcccaaagaccttcccagagcttgtcttttgttgattcctgatcccagtcagttgacaatcaaggttaactatcacactaagttttgtacatctccccagtaactatacatttttatacattatacatgcatgtatgcatatgcacacatgtgtgtatatatacatatatctcacacctgttaatatcactactgagaaaaggctttacatattgagacactctcaagttcataacggcagatccgagattctgaaatactatgaaaagctctgttactgccaacggatgtcagctgtcttctgaaaagggtctcagggtggttcaggaattgtggccaggctttgaagatgaacaatagtattagagatttgattaggggaaacaaacacagacatatttatctcaaaggcccaggcaaatgctttctcagagcgctgaggaacttgaaaatggactctcagaatcatgcacagcagagtctgctgaattatgggcaataggagagagttcgggcaccaagaaatgaaaaaagcatgccttttctctctagagagatggattctggatagcgaagacaggtatatttaacataaattttaaaaaaaggtttaatatgtttgttagcaggcagttttttaaaactctagagaataactcagtgagagctagctggccacaaaggccatcttaaagtcacctcaaatccgtatttttcctttatgatcacatatacagcatgctacgtgacagatggacattattgcaatacttatataagacagttgaaaataatttttatgtaacacactgggtataatcagttctcttttggttaagaatccctactgcaatccctgccatatacaaaatgctggtagacaaagaacatggctaagagacaagaacagaaatctaagccttttctttgagagtagagaaactcaaacacacccttgcatcataagacatgagaagtcttcctggtgagaaaactagtactgtgttacatgaggaggacatgtatgttctatgtctgatggaccagtgcaggaactatgtttactgcttgtcttgtgctccatctcgtagcctctccttccagatcagatcatgtttcatggataatctctttcttctcttgtttataacacttaattctcttttggatcattttctggtgggagtctaccaatatttctagttttaatctttttactaaaagaaaaaaaaagatcctttctgttgaattgtatttagatatgactgttattttttttttaaaactaaagacatcaacatttgcttttgcctctgctttctcacagcttgttcactctttttgttgttgttgtttttttcctgtttgcaacatttagtcatgtgtgtacattccaggtggctctatccttgcagctgaacattacaaaataaaacatatagctgggcatcttcttaatctttctagacattaattgaaaaagtcagaaatagatatttctagcatactaattttctcgttcctgaagacaagttttctatcttctcccctattaaatggtcagtggcccaacactatgcctatggacagcagtgatggtatcacaaagaacctttccagctagcatctagcaaccagtgtgtgggctctccgatgctttgttacaatagaagatcgtctcgttcatttctctacaaatgaggaaagaatacaagaaatagcagaacacaaaagaaatggctcagaggttaaaagtattttgccacacttccagtatctgagtttgctttcccacagatgtcaggtagctcatctgacaacctctactggcctctgtaggtgcccacacatatagcatacatccacacattcataaataaaaataaagcttgaaaatcaagaatacatgtaagaaaagaaattttattttctttctttttcttttcttttccttgaaacataattgtattaggattcttcagataaatggtccccccacaggatagatacagactagatgatatacatatagttatagatacagttatagatatatctccctcctctcacccccaaatcttctagaggtttgggagaccaccaggtagactggcaaaccataaaaggaaagctgatagcataagttctattttaaagacagaccatcatcccagcttggaacgggcagtatgacttctccattattaaaaacaaaaccaagggccaggtatggtgacatacgcctttaatcccagcacttgggaagcaaaggcaggtggatctccatgagttcaagaacagcctggtctacatagtgacagagctatgtagaaggatcctcacaaacaaacaaacaaacaaacaaaaataaaaaagcaaaaccaaccaaccaaaaccaaaccacaaataaataacaataaaaacaaaaccaagcaaacaaaaattcaaaagctaatacagaactctttctctttggggatgtaatatgtacccacacacatattgcttttgtgtttgtattgtttttgtaagacagactttcactatgtagcccaggctgtcctcataccctgcctc

SEQ ID NO: 808 - DNA, 92584 bp, Mus musculus
gaggcagggtatgaggacagcctgggctacatagtgaaagtctgtcttacaaaaacaatacaaacacaaaagcaatatgtgtgtgggtacatattacatccccaaagagaaagagttctgtattagcttttgaatttttgtttgcttggttttgtttttattgttatttatttgtggtttggttttggttggttggttttgcttttttatttttgtttgtttgtttgtttgtttgtgaggatccttctacatagctctgtcactatgtagaccaggctgttcttgaactcatggagatccacctgcctttgcttcccaagtgctgggattaaaggcgtatgtcaccatacctggcccttggttttgtttttaataatggagaagtcatactgcccgttccaagctgggatgatggtctgtctttaaaatagaacttatgctatcagctttccttttatggtttgccagtctacctggtggtctcccaaacctctagaagatttgggggtgagaggagggagatatatctataactgtatctataactatatgtatatcatctagtctgtatctatcctgtggggggaccatttatctgaagaatcctaatacaattatgtttcaaggaaaagaaaagaaaaagaaagaaaataaaatttcttttcttacatgtattcttgattttcaagctttatttttatttatgaatgtgtggatgtatgctatatgtgtgggcacctacagaggccagtagaggttgtcagatgagctacctgacatctgtgggaaagcaaactcagatactggaagtgtggcaaaatacttttaacctctgagccatttcttttgtgttctgctatttcttgtattctttcctcatttgtagagaaatgaacgagacgatcttctattgtaacaaagcatcggagagcccacacactggttgctagatgctagctggaaaggttctttgtgataccatcactgctgtccataggcatagtgttgggccactgaccatttaataggggagaagatagaaaacttgtcttcaggaacgagaaaattagtatgctagaaatatctatttctgactttttcaattaatgtctagaaagattaagaagatgcccagctatatgttttattttgtaatgttcagctgcaaggatagagccacctggaatgtacacacatgactaaatgttgcaaacaggaaaaaaacaacaacaacaaaaagagtgaacaagctgtgagaaagcagaggcaaaagcaaatgttgatgtctttagttttaaaaaaaaaataacagtcatatctaaatacaattcaacagaaaggatctttttttttcttttagtaaaaagattaaaactagaaatattggtagactcccaccagaaaatgatccaaaagagaattaagtgttataaacaagagaagaaagagattatccatgaaacatgatctgatctggaaggagaggctacgagatggagcacaagacaagcagtaaacatagttcctgcactggtccatcagacatagaacatacatgtcctcctcatgtaacacagtactagttttctcaccaggaagacttctcatgtcttatgatgcaagggtgtgtttgagtttctctactctcaaagaaaaggcttagatttctgttcttgtctcttagccatgttctttgtctaccagcattttgtatatggcagggattgcagtagggattcttaaccaaaagagaactgattatacccagtgtgttacataaaaattattttcaactgtcttatataagtattgcaataatgtccatctgtcacgtagcatgctgtatatgtgatcataaaggaaaaatacggatttgaggtgactttaagatggcctttgtggccagctagctctcactgagttattctctagagttttaaaaaactgcctgctaacaaacatattaaacctttttttaaaatttatgttaaatatacctgtcttcgctatccagaatccatctctctagagagaaaaggcatgcttttttcatttcttggtgcccgaactctctcctattgcccataattcagcagactctgctgtgcatgattctgagagtccattttcaagttcctcagcgctctgagaaagcatttgcctgggcctttgagataaatatgtctgtgtttgtttcccctaatcaaatctctaatactattgttcatcttcaaagcctggccacaattcctgaaccaccctgagacccttttcagaagacagctgacatccgttggcagtaacagagcttttcatagtatttcagaatctcggatctgccgttatgaacttgagagtgtctcaatatgtaaagccttttctcagtagtgatattaacaggtgtgagatatatgtatatatacacacatgtgtgcatatgcatacatgcatgtataatgtataaaaatgtatagttactggggagatgtacaaaacttagtgtgatagttaaccttgattgtcaactgactgggatcaggaatcaacaaaagacaagctctgggaaggtctttgggagcatttccagaaagaattaactgaaggaaaaaggagcctccttgagtgggcggcaccttcaggttatagagagcagaggttaagaccgtctgcttatctgcatgaccttagatgcatggcacctatctccatggcatctacccaaatggtgcctacctgcatggctccgtgctctttctgctgctgcttgctacatcttctgcttccaccagactccagcttctttaggattcctcatggattcaagaccagggactctccaggaatctgctaggctatcagcaccagatggggacggctggagacacccagcttcctagactgagttgggctctcagcctctctagcctgaacccatcccatagtctctcaaccagtctactgaatccattttcataatacaactatatatcctgttggttctattcctctagagaatggtgccaaaatccgtattgctcactaaaccattttctcccgaataattaatgcatgaagtaacaaaaatgaacatgagcactgatctatttatagagcaagaaaagggagtagcacaaaaagttcatcatggttttctgattccatattgcaactaccttttcgggaactagctggacagtgtttgccagtaatccaagctcttgcaaaccaagacagggagaaggattatggctttaggtcagtctaggcaacatagtgagtcctagaccagcctgaagcctggatatatatttatgtgcacacacacacacacacacacacacacacacacacacacactcacacacacacacctacctgttttagtttcaaatatgtttagtatcagtaacaaaggttttttttaaaggcttttagacattacaacagtgcaaaggagtgccgagaacttggtttcagagccacaagtgacaacacaattctacccattctagcttgaagcctatgctcttaaaagaagtctactttgttaaggaagtaaagtctactttctttaggaattaacacatacacaattaaccgaggcttggccatcaaatggccctcttgcattatttggcatcccatcactgtgacaaaagacttgagatagtaatcaacttaaaaggagttaaactatattttagtttacatgcatcatggtgagaatacatgatggaggaggaatgttcacaatggccaagaagcaagggacagacaggaaagggtctcttcaggggtataccccaaatgcaatgtaatgttctcccattagacttcacgtaggaaagattctaacatatcccaacagcactacaaaaggcagactgtggcttcagcaaaattgaaactataattcttgggtttagatcctaggaaccaggtctgcaacactcaacagattattaacccttcctattcttctgatccacatgtataatatagatagaaatagaacatacttcttattttataagaattaaatgcaaccgttggaatattccaagcaaatgttagcacagtcattaaaagaataccatttataaaacatacattttggggggctagaaagatggcttagtgggttaagagtaaaggctgctcttccaaaggaccaacacagctcacaactgtctgggctttgtggatatctggcatcatcatgtaatacacagacatatatgctggaaaaaatacatttaaaaagttaaaaaagcaagaaagactttgaaagttatatggttctaatataccaatgagagttactctaaggtcttgaaactctctactcctaaattaggaagccatttctccaaacacaattattgctcagttttcccccaaacatgtcttaatgttttcttagtcaaccagtgcaacactgtccttttttctcctatattttctattgaaaagcatacattatatctacatgaccggttagcttctgtatgacatttttttttaaaggtctgactgccaaggctacatcaaagagttaaccatagccagcaagcaaaactaccattgggtaccaattccggagatgaattttgaccatgatctagtggtgagtcgctaggtttccaaattccttccactgcaggtagacaacaactgaatggatccaaccaggaaactgtagatggagcattgagcatgctttattgctttaaggctatacagcatcgttacaggaaatttttaccatcaccaaggcagggcttatgatgatgctaattccttactcaaggcagctgacaagcaggaggagcttcttcataagtgtctgtggcaagcacataaaagtactaaggttagcgtttcattaagtactctgtagctaattacactcagatacatttttgcttttcaaagctacagccccccctttaagattatcaagcaattcccgcacatatgtagcagcttgatcttcacgtgggtcctggacaactggagtgaggttgaggtggggctaagggagagggtcccaatagctgttgcctgtgcgtgggtgcgatatgttctgctagctgagttgctttgtctggcctcagtgggagaggaagagcctagcctctcagggacttggtgtgccagggtggggagatacccagggggtccccacccactcagaggagaagaggacaggggatgaggtaagtattgtgggaggggctaactgggagtgggcagtgagcaggatgtaaagtgagtaagtaagacaattgattctcaagctgctcttaagatggatagttaccaagttctcttcatctactggctaggctcttcatagcctctcttgaattgtccattttgtatgttcttttcttctttcagatgccatatcttttagaaataacgtaattttgtttgctgagaccatctttccatttagttgtatatttctaatcattttacaatatgattataacacaatcattacaatagctgtttttgtctgtcatttgacttagtctaagcatttccatctgggaaatctgcagttggcatcgcttgattgtctttttccttgttgctctcattttcccagtccttcccagttaggaaacattggatggcgtactgtgtacagcaaaggtcctgttataattttcagaaaagcattggatggatggataggtggatgaatgaaatcaactggtaaactcagattgtgagttgtgtctcacctctgagtgggaactccatcactttcactttcatgtttgacactttgggcgtgttccctgggctctgtctctatacccatcccccttggggataagtgtcgggtacatggaagtccctaaattggaagtaaagatttcctttctagttagtctgtattttccccagtgacccacctctagccccactatgctctctggctcttgtatcagttttttttttgcccccaacccccagccagagaacaggattcccattttagctaatcataacacccctgctgtaccaggctatatgtgggtcccagctccgttgaaaaactaagatgaaggaacaagacctatgcctgtttaaccctacagttacttttcatgtttcatggggagattttctttaatggctgatgcaaggtttttactaggggcgaggaaacacatggtaagagacacagagaaagaacctctgaaagttagaggaggactggggacactgaagtccagtttcttatggagggctgggagttttgagggcctttgaatagtcttcctctgctaatttaggcctggtcagattgaacaaaagcaaggagagaggctaatgtgcccatatgtggcctcagccttgaacttgtcagaacagcctaccagcaagggggtctattgtcagaagaaaaagcccaccaggcccttaggcctttgtctcaggtcaggagtgtgggaaagaagcctgaagcttgccatctttcttatctgtttttggcccctttccctaggtgggcagtgccaatgggaaaattacttggacaagtctggaggagttcccaggcatccacttcttaggcagggctccgaggcctaaggagtaacagccagttgcagttagactcagatctctcaagcaaaacttcactcagtctagatgtagagaagacggttttctctgaccccctctttccacagggttttggcacatggtccagtcagctgcacgatttacattctgtcttactaagtaagtcttaatattactcatcgggttaaggaattttcttcattaacttggtttcttaaccccccatgaggctgtgatggaagaaaccaaaaggccaacttctaaatttaaactaattaaaggcttgggtttgagacaaacccaagccagactaccagtttgctccaccatatacatcttgcaatggacagtggtggcaaagaaaatagcatcttactgatgacaaagcctactaaggttcttgtgatctttctctaaatggggcataatcacccacggcattttctttttctccgacagatctctctacatagttctgacaaacctggaaattactatatagaccaggctggccttgaactgagaccttcctgtttctgtctcccaggggctaggattgaagacacgagctgccacactcagcttctccaacaattttctggactactttttcaataggaattaaaatagtactaacagtgtgttaaagactctatgccgctcacggagctagctccgaggatgcatagtcaccaatggttgccttatgttcaggatcatcagttaagtttatcaaagctccttattgaccctcttgagagacactctgatggctgcccctctctgttctccctttcagcatggaataagttagaaagatgccccgcccaccccaccccacccccaaacacacctaacggcagttagcatggccggagaggggagtgtgggactaggagagtcacacaaacccttggttggtgcagagattcttagttgctatctgtgcggaatgattcagtggttttattatgctttgatcagtccatgagctcctctgagtatttctccaaaattcaccttccaccattttatcctacgatctgctctgccttcctttcatggtgtcctagctttgttcccacatcaaactgttgcacttgctgttcccgcggcatggtctacaagcttctctagcttctacactagggtgattctaactggaggcacataacagacttgctgagtggaagttaactgagcaccatccaccaatctgaatattccagctcaaacaaaaacaaaggacatttatttaatggatttcacaccgcattagcaagtcagagctccaattctgtctcctgatacacaccattatatacccataacttaccaatgtaccctgtcaagactcttatggcttgaattaaatggcttttttttaaagatttatctttatgtgcatgagtattttgcccgcactgtatgtgaaacactataagcatgcaatctcatggaggccagaagagggcattcgttggattccttgaaacttgagttccataggttgtgagctgccattggggtgttgggaaccaaatctgagccctctgcaagagtagccaggactcttaactgctgagccacctccccagtacctaagcaattatttttgatgtccattttttttttttttttttttttggcaagacctaacactggtttgttctttttactatttctaacaaatgaagaatatccagtgactccatgatacaatttatttcagagcttcaattttcaactgtttcgcatttgactctaagagacagtgccagccgggcgtggttgcgcacgcctttaatcccagcacttgtgaggcagagacaggtgaatttctgagttcgaggccagcctggtctacagagtgagttccaggagagccagggctacacagagaagccctgtctcgaaaatccaaaaaccaaaaaaaaaaaaaaacaaaaaacaaaaaaacagagagagactgtgtcatactatggaagaaaccacagactatgctgggttcaaatccaattccttactacctagctgtgaagttggatactttgtttttaaggtttcaggaatgaaatcacctctccctaaaggaaagtgaaatatgcttttcacccagggcagactcagaaccaccaggctacaactccgctgtggctctggcctccctcttgtgtagtctgggctctcctcacttctttcctgcgtcacattctcttcttacttctgcttcagtactttgattttttttttcctccctgtgctgctgttttgccttccaggtaaagaacctgacttacttaagtttttggagattcagtcaagttgcttgagacttccaagtacctcttagccaccattttatacctgagaaaatcatgttcatcctgatgttgttttaatcttacttttttattatatgtaagtacactgtagctgtacttcagacactccagaagagagcatcagattttgttacagatggttgtgagccgccatgtggttgctgggatttgaactcaggacctttggaagagtagttggtgctcttaactgctgagccatctcaccagccctcaatcttttgaagcaaagtcttttaagtcttccctatggacagctgacataggaaacttttacctcagacctccatttttaccaaaagagtaaaacattcactgtgtgtgtatacacacacacacacacacacacacacatcactaataaccagaggtgttggcaacacatctgtaattccagtattcttacctgggagactgaagccaaaggatcatgtgctgcaggtcagccagaactatatcgtgagtataatgccagcctaagtaccctgtctcaaaacaaaccaaaaactcccaaacaaaaacaaaccccccccaagaacatttataatcctaaaatataatctttccatcagctaattatttctaccatgaagaagtctaattgctcttgtgacttacaatggctgtacttactgaagtacttgctaaagaatacctggtatgggcagatgagaaggctcaggagatgagcaccaagcctgacaacctaagtttaacttctgggacctacatagtggaaggagaaaaaagactcctgacaagttgtcctcttaacctacatggagtatcatggcaaacatttgcatatacaaaaacacacaaacgtaataagtaacaagaatatagcttgtggctcctctgttaaaggcagccacacaaaaaggtttcttatcaataatattcacaggaaaacattaagtaaaattaaaatttttagttattttcttattttttgagacaatgtaattttttaatttatttattgttatatgtaagtactgtagctgtcttcagacacaccagaagagggcatcatatctcattacggatggttgtgagccaccatgtggttgctgggatttgaactcaggaccttccgaagagcagtcggtgctcttaacctctgagccatctcaccagcccgataatgtaatttaattacataatttctccccttgccttcctcccttccaaatcttcctatatacctctccttgctcagattcatggtctatctatagatgactatcaaattcttttaaacctattttaaaatcaagaattaaaaaaaaaaagtcaacattttctttcaagatttcctccctagggactggggagatggctcactgagcaaagtacttgctttgcaactatgaggactagtgttatgatcccaacactacatgctgggctgtacatccaactgtaattgcagatgaatcaccaagcaccaagtttaggaagagatttaggaagattttaggaagagatggcttcctcaatagccatggaggaaggcaactaacattaagctctgactccacccacatatacatacacgtgccatacatgctcccacacatgtgaacgtgtatacacagaaataaacaaataaataaaagacctcaccccttagtcctgggcctgatctgaggagtggaccctgccactactaaaatgttaatgatgtaatgaataaaatgtttcaagtgtccattgtagcagattattaaacactttgacttcaatctttgagatgaagcaggagaggtggggatttttatctttgtgtggaaatgctgcttctgatacttagataatggtatttttcaggatgtttggttatgggttaggaactaatacatagagcaccaggtcataaatcacacccatatcctgagtaactcaacatttataactcactgtccaacaacaaatcataaatggcatgactcttcaacattacaaaactatttaaggtcaaaatagagcctttaacttctgaaaaatgacttagtgtttttgaaacatacacagagaacactaaaaagttaactctgagaataaagaggaaccaattgtttaaacaggctttaccaaaccaatttagacaacagaatggtcatggctacttaagatgaggttactataaattctccttagatatactaaacattttcaaactccaagtctgagtaaagttttgtggaagtttctgggtacaaattgcaccagtctactgaaaccccccacacctgctgaagccactctcaaataacctatccaacactgaagtcactctgcttgaggtgagctgacacatttatctttgctctatttttcttgctagaatgcaaacttcacagacaggaaactgctgttcacccaagtgcatgccgagcgttcacaatgcctgacgtaccgcaataactactcatcaaaaaaaaaaacatttggacatcttgcatcctgttaattggacaaactaatctaaatatgttgggttttattattaattccctttgctgctcaagaaagctaagtttttcaaagcatattggttagaatagcaacccaaaatattattgtttcttgcttgtgttgaaagggggtagaggaagaccctcaggagctccactgcaggtgttacctcaagacctgggctggcagagccatgacacacactaggacacacttcaggacactgcactagggaaggaaaaagacaggagggtacagggatctctcactgcctttacttggaagtttctctgcactttcatggctatttcactctagtaatgctctagtaaacagaatctaaactctgaggatggacatgcaagggagccatgaggtctcatacttcctagcacaccccacagcttttacgtagtttactctggtgaagtataaacttttcaacagtaagatcaggatgttcctctttcactaagtaatatagtccaaatacctgttacacatagcagggattgattctcggatgaataaaaagctaagaagcaaatcatcaaaaataatgaacctttttaattgtttaaaggaaaaatattctccacaggaaggtatttctagtcttatgtccattggtagccaaacggaacttcataaaaacacttccacaactccaactttggtttaatatacaactttgatatatctcattaatgcacacatcaagaggctaacaaattcattaatattcaaggtcatccaaaattaacattttattacaataaactgtaaaatcccagtgggaaaattttacttgaaccaaatttcatctctattctagcactttcaaaactaattctcccatacaaactccacaaatagacacacgcacgggcgcgcacacgtgtgcacacacacacacacacacacacacacaatgtgcacacttccaaactcaatagaaaatgaggaccatttaatggagacagaaaatagatactaaaatgctgtttttaagtaggagtatcatttagaaaactacacagaacaggtggaaaatctcaaaagtatacataacagccagtaagtaaacacatctaaacattaagaattttactgtaagctaaaccactacaagccttgctccattctgtataatctaaccattgtgacagatgaggttccacatgagaagacataaattatttttaatcttaaaaaacaaaaaatatgaatccttgttaaacatttcatttaaaaatatgcagctttattttaaatttaaaattcagtatgctcaaatatggcagttaatgtctcccacatatgtaaaagtttaaggtaacacatttttttcataaattataaaatgttttcagctaaatgtttcatgaaaattctcaaatgactgtcaagagtttgtcttgttgttagcccaccagaatactcaacattcagagctaaaaggtaacaatttgtgaaatctttaagattcttgtgtgatacaagtcacagaagcacacatataaagacagctgagtgacagataaatcagtagtagttcctgcttttacctagggggcaaggtaggtacgcatttgctgagcaagtttgcaaaatgcaagaggactcaaagggtgaccaaattctctactcacagtgcgtcacgcaccacgcttcaaagagaaatacccacactgagcttgctctgctaaaccaacgtaacttgtatttactgattcccctaccatcctcacaccaacaataaacattcaaataggcccagagagctgacaaggtctctctataatgcacatatcccatacctgctacactaaaaagtgatccattcagtgttcatttcctaaaaactaagctaaaaggctttggagacatacacagtacaggttttagttttaaagagaaaatgtacatgagtaaacagaaaaatgattgcttagtcactaaaacatactaatactgggtatgccccccccccccaaggacatgagaattgtgatgttatattcacaaagtgttacagagcaactacatttagagtcagaggactgttaccgatgacactatcctgccatcttcacactgtttaaagcttgcttacatcctgatacctgttgttggaagatgggaaagcagctatagcgtatgcataaaaacatattctaacagtaaaaggaactatactagaaggcttcctgttgcaatgtaatttcataggaaaaatcagcctcttgactcctaaagtggtccattacactgtgtacagattttagggactgctctctgtaccacattgaactgggtactcttgtttctactcagcaacatttctctctaccctagcaacaagaatgttgaataaaatccacacacaagccacttaagactaagctttagatgtaccacaaattatctagcaaagtatacaggaactcgaagtttcacgttagaagtaaatcaactgggcttaaggtctgattctccgggagccctcagaagcctgcatgttaaacactggtgagttttaaattctcaatggaaatggtgatggcattcactgaaccaagttggcttaaattacagcacaatgggggacatgatctaaaagcaaaatgtcaggaaattcctttttttcaaatatcatcaaaatgtcatataaatcaaaatacctttatattcaagttttcaccaaactaagaattctaaagaaaatgtgtgactacatataatcttcatatttctttacataattgcatgctactcggtttgtatttttaaatgggtcacagagaaactatcaacttcatgtaacattaagactccacattgacattaatggtctgcttacttctaaaacatcacaagttatcttactgttatattgaaaggactccttagcctttaagaatattagaaaggagatagtatatttgagcctactactctggacaagtcccgatgaaacctcccatgtgctgatggccaactgcagtgttaaaaaaaacagaaagccacagaacagacctgagacatcaagcccgttcttggggttagggctatcttcagacatctggcttataagaagagaaataagcaccgttttccaagaaccttgaactttttactgtgcctggaataacttattaagtgatgactaaggcttaaagtgctcttcttaaccatgagtagacaggtatgtgtctaccaagatgacagaaagatgctttgcttggaaggatagcaaggagggggaaaaatagaaaaatgcacaggaactttgtaatcatatgtggctgcccattactgaacattttaatggatttaagcaatttgaattataaatactctcatttaataaaacacccacacaatgacaagaatgagactttaatcagttttaagtggagtttataacactaagagataaagggttgttaacaaacacagtaacaaatggacatctgattggtatgaggcattatcctgtacacgtcatatttgtgtatcctcagtgcatagcatttacacacagagccactgctgcacagcacaagagtatctgaagaggctgaatcggggtaaggctgttttacagactggatggttttagtatatatattctatatgaaaacagatcgaacttttgagctggcaggtagaaggcaactctgccgaatactagagtaaaagccccccgtttagtgcacagatccaccccttccgtctgcatgcacgacacattaacagtatttaaaggtaaacgaggcactttgtggcaaccacagccatcgttatgaacatattgcacaaattttctaaaactaaacatgtaacttgtaacctacttttatttttaaagctgaaacatttgatgctgccggtaaactccacttaagtttataacctgtgccacagcaaagaatggtgacgctatttaattcaactacccttttacaattatggcaaaaatgtccaagaggaattacagaggacttgggatgtacggggcccaactgtaagccttcttaaaggtgatgccttcaagtcatttcagacacataagctgctgcacatccaagagtctaagaaagcattccagaaacacgggagagatcacctacagaatgcacttcaggctaatcgtgaatactgtcataaagaaagtttgaattaggactcaaaaccctttcagtcatagcaattcttgtcaaattctatggggatggtaactgaaataaagtaaggagagtatgtataatatatatatttatatatatataatatatatataatgccatttttccatttccaatgactacaccataaaatgtaagcaaggcttctcaaaaacactgaaacattcaaaatcaaaaccctcattcagaccttcacattccaaaggaaaaatattaacagtgcaacagcccattgtaatgtcattattcatgacctggccctctgtgttacatattggaacaatacaagttatagtttagcatgctgtgcccaaaactaacaaagaacagtgtttatcactatcttcaaaacatcaacagctgctttgcattttagtcagccactttcagcttttaggaaagacaagggggtgtacagatttccatggtgagatctcaggaaaagttgtctctgactttatcaacagtcagtcaatattcatgtatcaatgtttaaatataaatgtgtaaatcctaagagctttgttacaattttaaaaactttattggttgagtgaaactgatgaggtatggaaaatacatcaacattattttctaagaatattttagatggcgttctgcctaatctacttaccatcaaactataaatgcttctctagtgggtcctatgcaatctgtacttgtaaattaactaggtcagaccacagctagtgaacaatttcagcaccaataagttattgaaaatgggacttcacaccattaagaaatctaataatggctggatattcaaatgtcaaggtcaagatataatttgaaagacaccaaattcccgaggggttgggaggagatcctttgtaatagcatcttcacattaccattacgatagtagttgtactcttgctttaaattgtatgcagtctgggcatatcaaacatagaatgatatttaagaagtaaaattgaagccctaatcccaactctaccactataacgaagtgactcaacactgcacatttaagaagatctattcttccaatagcaagtcgataaagcatctgtaggacaatttctactgaaaaacttcaatgccttattattcgtgcagtgctgtaaatttactgcaactctaatttcttttttaacacaaacaatgacttttttaatatacacattatatgtattcagtattcaagtaaaattccctaacagttaatgacatttaaaaaaaatgtgcaaaactgcaaaactcattgtaatagaatgtgtaaggtcaaaggggctgaacgtctgacagccactggactgaggacgcgcatcatcaatctctaggaaaaaaaaaaaacaaaacctgcttactgttgaatctcaagttgaaatttcctgtgaagaattataaaatatttaaggagaaaaacaaactggcagccagcacatgaagcatccacagtaggtatatgattgaaaattaataaaaataaaggtaaggtgttgactgatgtagggactaatagcatctgactcttagcactggccttgattacataggagatggagcagtcattacaactgagaaagcatactgaataaatcattgtcaaattttctgtttccagcccatcctttgttgaaagcctccacatttgtatggttaagtcattgctgctgtgtcttttatctatctatgaccactttttttatatcccttcctttgtggattcttaagatgctgtagatggttcattcctgtaccccactacaaatatactcactctagctgccttgtctagcaccaatatgctctttaaaatgcacaaacaaacagcaggacagcagccaatctctcggatgtccagattagtaagtggagcatgctaaagaaaggtgcatctaaggagctggagatggtgtatggtccagagcccaggtagaaacattcctttctgagcattccctccattcccaacccaagtgcatgcattagaatctaacaaaaccctgcagaaacttccttagccaactgcaaacttatctgttgccacaagtgcaaaggggtaggacgtgaacccgggaatcagagctcttcagccacttcagctggtgacagaaaataaaggaaaaactcctgcgtatacacatcagcctgtctccactttttataaaactggaataaaatgggaaagtgccatcttttatttatcctaattgaattttaaatgtccttttgacacaaaaaggtatatacatgacacagctacacaacctttttttaactggacaacaagtgtcaaaaccctgtggatgtatagggtaaaacaagattggtcaggagaagagaattgttcctataactgcaatctgacacaatgtcctattgccatttaaaaaaaaaaaaaaaaaaaaaaggtccatttcagtttattcaagttttttttttttcatggtattttatccctcttgataagaaaaaaaaaatcagacttttgtaatttgtgaatgctgatcttcatcaaaaggttcattctctggatcagagtcagtggtgtcagaatatctataatgatcaggttcattgtcactaacatctggagtcacagaagttgaactgctagcctctggatttgatggctcctctactgtttttgtaaagtatagtttcacctagagaaagaaagtttaagatgaaaatgaacaattagaatgagttctgtattagcaaagacattctgttttgcagatttacttgaaagtactataacaaaatgaattctgaagggcactgcttttcagatgacctgaagattgactactgtgctctcaaaagacacaatgatgagttgaaagctatttttaaaatacatcagccataagcactgtataattctataaaagtgcaaactgaaggcaatgaactcactaaatcacaaaattcaatttacaagtgcttatgtttcaaaaacatttctcttgcaatctctgagacaactctatgtttacattagtgacactacacaatactgattaataaggtcaactagctctacaacagtcatctgacgagagaatggtgcaagctaacagagcactctgtgctgtgaggattgatcagtagcctttacatgcatggctgcagttcttaggttatttccattttaaaaggtaagaaacaaaaaccctgaagtctaggccacatgctaaaggacaatctctagtgaacaattggcagagaccaggtttaaatcatatctttgctcttttcccattatgcaagtcattataagtttttcttataaccaacatttgctttaaaaatcccccttcaaagttagtaatttaccactgctccttgccactacagccccacggcctctcctctccctagtttctgagccagtctcaatttaggaagtgaactggaaggttaaaaagctcagattataccttctctgtgttcagcactccacactgctacatcaagactgggttcctgtgactcagtggaaatgacttcagccactgaatataccaagctcattcatgcctcagattctcatttctactcttcctccttcccccacataactgttctgtaggtcgcatacaatttgcataattaaatgcacccatttcacgcagacaaccctctttacagaccatccacttgaccagactttctttgccagctgcatgcttcataggacttaccttacagtgacaatgaaaacagcttttatctacacgaactattttatgctttatttttttactggttgttttgtaggacttggtgttcaactcaaggcatttctcatgttagacaagcattgaggcacattgccagaaaaatattaaaacagtaaaactagagagaaatacattttaaaagcaaatggttgccaggtgaggctgaggcagagacatgccagttcaaggccagcctgagcctatataccaagatcctatctaaaataaaaatcaggaagcaggtggttgatagaaatgtaaatttagagaaaaggaaaaaatgaaaagttgaagattctaaaggaaacttaaaacatacttgagatccaaaggcactgaatattaggtctatgttcacttaacatgtgtgaaggtcattttctattttaaatattaggagtattattatgttataataataatataataatctatggttgagtttgttacatgtgaatgaaacaaatacaatggaatgaaaaaagaatttaaaaaggaaaaaggaaagaggaaagactcaagatggggaggggggaggagaagaaataaggagagcaagtggagtaataaacagaaaaggaaaggctacgcaaccactcgggaatgttacatattgaacaatactagaacaatgtctagctcttagcttcacaatcagaataaaacacaccctcccacccccaaatggttttaactgaccttaaaatttggagagaagtatcggttggccttgtctttgtttgctttgtcaagatcgttttttgttagggtgagtacaagatactccttgtcattatctgcacgctctatactgcaaatgctatcgatttcctgatcacaaagacttccattttccactttttctgaggtttcctctggtcctggtatgaagaacgtatttacccaaaagtgaaacattttgtcctaaacagaaaagaaatggaagatgtatttcacttatttaaaaatgtaccacaaatagtcaacatataaaccatatattatttgatattcttaagtgaaggcaaacaccttgtggaatattcttattcactaagttatcttttctaaaatttcaaataaaaaatataatcatgtaaaatctggtatcttacttttatcttaaaatcctaagaaaactacttcttattctaatactggattttaaaaatattctgagtttatgcatatgtaaatataaacaaagatcaggtgttgctacttcaacagaagccctagtaagttgatccctatggcaactacatttctggcccctgtatctgtccagtgtccatggaggcccgaggtaggactcagattcccccccaggtctggtattacagacaactgtaagacaacagatgggtgctgaggaccaagcctgtgtcctccagaacatccagcgctccctcctaactgctgagtcgtgtttccagcccttttcaaaccttattgatctcaattattttaacaaagttgttcagttggcaatcatattttacttagaagaaaacacggtaatattatttaaacttgcaaatgtagctcactgatgtgcactgattttctaaaactgtttttatttaaatcagaacaggcatataattagtaaggaaaacctatgataaatggaaatttatggaaagtaatctaaaatatacaaatatattataaatatccaatcttcagagatctggagtaagaaacagcacatctctaaaactacaaggagacagtgaggtaattatctctttttacaagcaatataaagccaagagaggcggctcctgtcttgggaatttaaagcaaaaagactgttttatatgaagccaacctgagctacttagtgagttccagaccagcttgagctacagagtaagaatctgtcttcaaacaaacaaggaaagaaaaacatatgcatgtgtgagcgcacgcacacacacaagtgtgagcacacacacactcttatgtgaatcagagtcttacaagatgtaagagatagcgggcagggatggcacaggcctttaatcccagcatttaggatgcagaggcaatcgatctctgagtttgagactagccttgtctacaaaacaagttcgagacagctagagctagacagagagaccatgtctctcaaacaaacaaacaaacaaacaaacaaatgaagtaagagggaaaaaaactaaagccttccaaatacctaatttttgaaatgtttgctcacatttattgtggtctcagaaaataaacaaaaaaaccagtaactcaaagatatttatatttagcttttttgtttcatgagaggtccatgataaaaacattaatttggttaactttgtgattttttttcttctttagctatgtagatcctagaaaaaagaaattatctctcctgataaattgatctgacattgcaaggttttatagtaagtaagctctccttttactgctttttataaaacccccttccggactatgtactgctctatgtgcttcacgggaattgattctgcacaaaactggtatcttcttctgatccagctaaaacttctacaccttaagactcattttaatgttcacattcaactaagggtactaaagccaccaaggataaatgttcacaccaaggacactgcacctgagctctctcctcctcccaagtgtatctcaagccccagcaaccctggacagaggatatgcttagctgtttccacccttttgttttttggtatgtttttttttttttttttaattactattacttcttcacaaccacttctttcaactaagtaatactgactaaatactcagtactgactaaatactcagtactgactaaatactcagtaacctggggaaacaaaatataaaatagtctactctcaagaaacataaacccaaatgggtaaaacatggcttgtgcaacataagaacatagaacaaaccaaaaaagccaacaaactaagggtcggggcaggtgagtctgcttacatgtctcatcaatgccacagaaatgaagagtctgccaatctaacaaaagagtaatcagtttggtagatggcagagaaatagtctctccttacagaataatttcctaaccaaaggctttaagcaaaaggtctgtggttactcattgaggaatggctatttctacacaatagaactgaattgcaaacctttttgagcatcttgttctgtttgtggaagaactctactttgatatcaccacacacaggcaatggctgagggaactcaaagtacatgaacttgtcctcccgccgcgtgggtcctgaattggaggaatatatcttcacctttagctggcagaccacaaactgaggatctgtgtggttaaatacatataggatcatttcacaagaaatgtcttcaacttatcaaaaactactttaatgataaaataaacagaaatatacacaaaatgataactcttcatattgactgcttatctaaaacaaatcagtagaaataaaatatgtaaaaacataaccaacccatgtaaggacttcttcaatctgaatccttaagtaaagttctattacagatatgataatcaattgctacttcacaaacagtaagttctaagactagactctagcagcatattaacaattaaagctttacattaacatgcaaaagacacatcacaaactactttaagcataaaataactttaacaatttcctgggacttttgtgaactgcatagaggcaactttacaagaatattttaataaacgatgtaaacctaagcctttataatatagaaatatacaatactgatcatctttcttttgacctccagttcacaagtttttgtttgttggttttggcattttaagacagagtttctttgtttagttagccctggctgtcctggaactagacaaggctgttgggagaagtaggaaatgagttacatcaagatacactgaatgcttatctgaaattctcaaggaattaataaaaataatatgtttaaaaaaataaaaaacatgtatagctgggtgatggtagcccgtgcttttaaaagtgctggcactcaggaggtagaggctgccagcctctggatgtagaactctcagcgtatctgcctgtgtgccaccatgcttcctgataggttgataatggacaaatcctctgaaagtgtaagcaagtcccaattaactcttttataagaattgccttgtcatggcatctttccttgacaatgtccccagctgtagtgtacagtaatgaaaaaacagcagctttttctaagaccactgagacaaaacgacctcctatagaccatgagtttcccattgagttggaaattgttttttttgtttgtgtgtttgtttcttttttgtttttgtttttggtggtctttcgagacaggatttctctgtatagctctggctgtcctggaactcactttgtagaccagactggcctcgaactcagaaatccgcctgcctctgtctcccaagtgctgggattaaaggtgtgtgccaccacgcccagcaggagggatggaagttctaacatcaatattctaatattagtacagtcctcttgacttctgagatgcacatctgaaatatatgctatgttaattaactatgttctgaagaaatgacaggatctggacttgacaaaaacaaggatgagagtgcatcctgacacaaaagcaaactgatcatttttattatacagcaacttctcttcacgtagaaaaagtaaggtaataagacaaacgcttggcaaacacttcctggtccctctgcagaagacactaaaccttttatcactagttctgtctgtttcactcatgcctcctcctcctcgggctggagactgaaggcaatcctgcactctagcttgagaaaaacactacaccaccaagacagagctgcagccccactgcagatcctcacaagtaccttgatctcatcagatttaaaataacttaaaagcaaagtgataatatttatatctccaaatctcaaatgcactctgggtatgaacaactaaagaaaatccaaacaaagtacattccatcgctctagcaacatctgccaagtcacagagctggctgtactacccctcctacatcacaactgtctatacaacatgggcctgtccttaaaacacagctgaagttcctagaattatcgtgacaccaatagtccaagtctattacatcccattcaagatcctgtgacagccaatcacatcttctatttctcgtccagttcttctgctgtgtttcggtcaccttatttctactgcctgtaatatttccttcacactcaatgccaatccaaactgcatgtgttctccagtgaccgactttcttcatgaaattgtttccaaaaccttttgtgaacatggcagttataatttatacatatgaatctcatgagctttattttaatataacttcaacatatagtgttaaatcccagcacataaataagtaactagaaatttttaaagattaaaaagaatttagtagtcaatattttttaagcgtagagatgcaaacataatgttgtccgactaaaagcccaacagcagtttaatcaataagcaaagtagagctgacaaaaagtcagtacctagtgagattcctgagcagagcttttccgtattgcctccataccgcctttacagctctatattgatgcctaaactataggaagaacatgagttcctatcccctttccttctcaatgaacctagtgaagttcctaggtcaattgctttcaatagtccattgtgccttgtactcacacttttaaaattatactaatatacttaatcagtatggaagttccttagaactttccaacaagctatataaataaattaggggcccttaacaaagttgccatactcatgggcaatcacacctatctgacgaagaaactgattctctacataaaaattattttagaaagaacaagttaatttaatgaagtatttcatggaggcgaaaaactaaaatcactgacaaactgcaaacatccataaaataatatcaagggattctaataagtgacatctgatactatgacgttatattgaaaatacaaataaaatatcttaagtgtaaaacatgactgaccactcccaggtgtcactaaggtaagagaaattactacaagcacacactgatgtcatgacgtcatacttaccaagatttctttattttactaacaagcaaactcagtgaggagatgacaagtccaagccacaggctgagagcttgacttcaaagctacacttaggttttctccacacatcccaattcacacacccttttattctctatatttgaagggctcctctctttctgtctctgacagtgaacatgtttccctctgatgaggacctggttgtagccagaggccattctcacactgatctgtcaagagtgtctctcagattctcacactgatctgtcaagagtctctcggttattttgtcagaacagagactgcatctggtggttataacatagaatatttctcccataaatataattgacttgaagaacaccaaaattgccaggtgtggtggctcacacctttaatcccagcacttgggaggcagaggcaggcagatttctgagttcagggacagcctggtctacaaagtgagttccaggacagccagggcgatacagagaaaccctgtctcgaaaaacataaaaacaaacaaacaaaaaaagaacaccaaaattcattgggttagctttcttaacccagtgagttgaacaactgaactaattaattccaacttcagaaatatactccttttaacctggtaaatgtatttctaaacatttacatatacatttagatatggttttaaaaagttttccgacacacagacagctaagaatttagagcacttactgcaagttccgccactgaacattggaatagtttcaaacatcatcttgtgaaacagcagtgccacgggtctgtaatccaggtgattttttagcaggtagctataataatatacatagcgcctctgactgggaattgtgactccctgataggcccagggggcagagggaggagggagacaaaagaaaaagagaagtcaaattcaaaaggaaagtttcattaaagttattatacaaaattgctataactgggttatcccaaagtttctcctttaagtggctaacaatcaaatctaactcagtattagaataaataagagcaataacaaaagaatattcttaaaatgtagttattaaatacctcatttattcaaatattaaataatgctctgatctatgaacccaataagcaaaggccactgtgtattcaaacagacagtcaatggtctctgtactgcagctacacatacccaagtctcctctcaaagatgggtttactaggcaagtcttcacaaacctgtttacatactttctaagcaaaatcatatcagaatcagtacactagagaaacgtgttgcctctgtgcaggaaaaatgagattctgaccttagagtccaaaaaaaaaaggaaaagagagagtatgcagctgaatgataaacatattcaatacaacttgttaacagaggcagtaaggggtatcggtatccttgtgctatatccactccttgcagacattagggaagcataaaatggcttagaaaatattacaaatatttaaaagacataattcatatgacatttaaaaggggaccctaaccaggaatggtgtcccacacctgtaatcctaccactaaaggggatgaagcagaggactgttccgaaccagcccagggtttatatagttccaggccagccggaaaccagtcaatcaatcaatcaatcgcatgtatgacccaaaacccatgcatatgtttttttcttagttcttgaaatattttgtgagtgttttgccatatgtatacctggtgcccacagaaaccagaaggcatgccatgaaactggagttacagatgtttgtaagccattgtgtgggtactgggagttaacctgggtcctctgcaagaacaacagtgctttaaaccagctatcacttcagccaacctagcccatgcctatatacattttttaaggtaccacgtaaccatatatatgcctaaaacttcggcatgggggagcagagacaggcagattcttgggattcacaggctggcctagcctacttggtgaattccagaccaattagagaccctgtctgaacaagatagatggcaccagaggatggacatccaaggaacatacagacacatacatatatacatatagacacacacacacaaagacatacataccatatgtgtaacaattcattcactaatgagttaatatttttctattcacaatataacagtaaaaaagtcaatataaggcaaataataagcatttaatctaacagtttaaagtaaacagcagttttggcatggcagtaccctcttgtaatctcggtacttgggtacaaccaaaatcgtaagtttaaggccagcttgacctatgtgaggcccagtctcaacaaacagaattgcagaaaataggtattttatgttaataagaaaaaggtattacaatgctctttagtttactgatggcctctcaacttctactgtgataaggactctagacacagacacccttctgctggggaagaagacagcatacaagctaagaagtatagaaggaatacgatgtctagcaaatacaggtatatgaactctgaccccaccctcttcccctctctctgtctttctctgtttctctgctccatatgtgtatcaaaatggataagtggcagtatacaactttaattccagaattcaggaggaagaaagaagctggtggatctctgtgcattccaagccaacagggctacaaagagagaccccgtctcaaaaacaaaaacaaacaaacaaaaatggatataaaccacttgaaatcatgattggcaatttaagactttggctagagtgaaaaatcacatactaaatagtcaaagcttatatttgaattctgagaaaatataaacttccaatttgcttctttaaaaaaattaatacaataatacaaacctccttaatagaatttacatgaggataaaccagcaaattcagttatataaaagaagttaaaataaacaaaaaaatatagtagctgataatgttcagatggcatttctcctgctctctagcttttggtacacatttcacacttgtgtacagcaataaacagattctcaagtgatgggaaggacacctattatcacaagcatttatatgctcatccttttgaaaaaagctgggttgatatgtaagtaaacaattctcagatcaacagcagttgtgtgaatagagctcacagagctcacaggcagtggtgatacagagggaagcttgcaccatactaaggcctaggcagcaaggcgaggccagagcatcgtacacccctaggacttaactgcctagctaaacacaaacatgtgctacattattcatctttgagacagttacaaaaacccagatttaaccctaaacactattaaaaaaaacaccagttctctttcttgtagtcaatgttcgatttgctagcccaaatagttcagcatttcctcagttcactcctttatatttttgtttcattttctactggtgaataatcaatgtatctttcttcaaatggctcaaaaattattgaagaaaatggctttaaatttccataatgacctgaattaaacttcaaactatagttccactcaactgtcaagacaggtaacagggctctactttccaagcttgtgggatttgtagttaatctggtgagttattaacctaagcaagtgggcactgcaaagcactcaggtgccgactctatcactgtcttcagtgtgcacatatttactttgcgcctcctccgagtctagctttttattttccttctctagcatttgcttaacaaagttgactccttttggcacagacgttcgtaacagctcagtgtccgtatgaagtgtctcctgtgtgagtgtaaaatgacatctttgatcagttttatggtttttattataatgctattccgataagaaaagcctgccttggaattttacattttcctagtgtatttttcattaattcttcttttataagccttggctacttgatgctaattactttttctctttttggttttcaagataagagtttctttgtgtcttgaaactcatacttcccaagtgctcgggatttaaggtgtgttccaccatgcctggctggctctttgaaaaacagacttatatggaggacatacatctttgagatctatactactgtcataagactactatacgggattagcacggaacaacacagtgtgtgtgtgtatatatatatgtatatataatgtatgttcatcctctatgcattcagattctagatgatcttctagaaggtaaattcacaacttagagtccttaaagaagtaattttctatttgagcaaactttcttaataaactggaaaatattttccaagtctaaactcataaataaaagtttcaacctaaaaagtatttgcttgaagaggaaaaacctacattctgaatgaccacaataaacaaggcagtaattcaataaacaaaagaatgtggttactaatactatgacaatagtagttattgtagatattttctaatattcaaaacatatttctattattcccataaaattacaaggtatatattatcacatatcttatgttttaagacagggtctcattatgtaccccagaatggtctcaaaataggtattctattgcttcaggctccaacagtggagattataggcctctgtgacaccacagccaaccattacaacctcaatttccccccaggggagagctggcctcaaacacactgcaggatctgatggtggctttgactcttgatcctcctaactctacctgccaactgctgggtcccacgcacactgaggccagccctgctgcctctactttaataagaaacaagtaggactatacatgtttatcttgctcaaatgcagtacaggacctaaatgaatctgactcaggtgacctgaaaacaggaatgctatgcgatctgaatgaagccataacttctcttaattcagtttttcccctttatgaagaacctctgaagtttggaatacataatgcttcgagttctatggtaacttacagaatctctgtgacaaaagtgacacagatcatttctggccaacactctttcctcacctggattttctttagaagctataatgacagttttgtggtttggggtgttgggcctattcttcaattcagatatatgaatttgtaagaggattccactcactagcaaaagtatttgtttcaaaaaagaggtagatgtgggctggagaaatggctcagtggttaagagctcaattcccagcaaccacatggtgtcttataaccatctgtaatggggtctgatgccctcttctggtgtgtttgaagacagtgacagtatactcatatacataaacaaatcttacaaaaaaataaaaaaataaaaagacacaccctttaagccagggaaatcagaacctattctaggaacctctagtcaaatgggtgttcttttaccactgcagttagtcaagagtgtaagcctaaagctacgggaccatagcttggtattacttgcaaagatcctttctgaataaacatagccaagaaagaaaagggaagagtgtagaaaggagaggttcctgacacttattgagcatttagatccagacctgaccttttaggttctattagtcaataaacatctcccttgtgtcttctctgtctccttctcctacttgggtttctcttacctaaaactgaaaaactcacacattcaaaacagcaatttttctctctctctctctctctttttttttttttttttggtgttggtttctattttaggaatcaaaaagaaaaggaaaaaattaagtagagcttagtacagcagagagaatccaaggaacaaaattaggaagccaggtgttgagtatgacaaagaaagactatgaatcagggcagtgtggtctttgcaaatgggtttgtattaagtaactgcttaaatctttcaaagcctaaaactgcacagctttatgaatcagtggactgctagatagtagataatagcccaaacagtatgcatcagaagagaacacatgataattgacattacaagaaaattatactgagttttttgttttagcaacagcaaccacaacttgtttgatttaaaaataaggactaagcaagaaaattttatgatgaggggatttaataagtaaaacaggggtagggggataaccttgatagtaggttataaaagttcacttctcacagaaaataatgaaatctcttaaaattaagcttggcattgttattttagtaaagttgacaaactgaggtagtaaactaatcacacacacacattctctctcacacacactcacgtagtcaaaacacacacacctacctaataaccaacttgtaagcaaagaaaaggcaaactgaaacgtttcaatccctcccctaagtttaataagagaactaagcattaaggttactttccttgccactgctggaggccagggagaacagacactacgtatggttagtggcagtgtcttccctcaagtttggaaagttactccaaaacctgcgctcattgccattctgaaaaggtctttcttacactctcctcatagtttacatcccgcaaaccatgtattgcagcactgaaccctaagtgcatttgcaaacagcaaggcacacgtggaaaccaaccccagaaggtaatttacagcaggaggggctggcgcggggtgtgtgtgtgtgtgtgtgtgtgtgtgtgtgtgtgcgcgcgcgcgcatgtgcagtcagtcgggattcaccctcagtgactttggatttggataatttgccaccttttcacaaaggaaaatatcaactatacaagtaaataattcccagtaaagtgggcaacacacttctttgactgaataagggtatgggtctttgttcccttgagcagttacttcgcccttgagatattttttctttataggaagtagcaactgttgaacttcattgcaatattcaaaacctgaagtattgttccagcattaagaacacaatgctacattttatggtcagcttgcaaatccaacctgcatcatatcaagacctaactacaggactctgagaaagaaagtactataagtaaaagccaaaaaaaaaaaaacacacattttaggcaaagtctacaattttttcacaacaggccaattgcctcctcctttaacataaaagaaagaagatgaggattctgtaccagaacacaaatttcttcagcttcttatggtccctccatagttaaaattacaaatataaacaaaataatacagacaattctaatatgattaactacaaagcagatttaagtattaatctccagaagttcacatttacaatcacaaagtataaatccagaaacagcaaacacaacaagcagcacgaacgtagccacagggactcctagctagtctacaagtctgcaagtccactgtgtgtctacactgccacactgagtcatcaattctctaagattcttctaggaagacttcctcagctgtactaaagcagctttcctatactcagcaagctaaaacacatccatcattccacagccactctaccagcccaaggcccggtgccttttaaggtttgttttattatttttctttgttactagcgcatttcactatgacatttcctcatagaggtaccgttgtacttccttctgagtcacctccctccctaaacagttcctcttctgcatttctgtgtggagcaggttccactcttcctttcaccatcttcccttcagatctccctcccccaaagggtatgcatacctccaagctaggttcttcccatgagagaaaacacgtttttctgatcagatttgttttacttaaagtaatgacttctagttccattctcttcctataaatgccatgattttatttttctttacatttaaaagctttgagaaaattaaattgtaaaaattttaaggaaatgcacagcattatagttacaaaactagcaatctctctctggagattttaaacttagactggaggttaaacactccaagattttaacctggagggttattaaacactacgatttgtaaagaaaagcataaaactgagaagcctttcaaaaccatcagcaataaatatggaaccttttgcagttcagaatctgtaagcttgataatatacaaagaaatttaacaacacaccaagggacttgtttttactgtaaatgctgtcatgaactgattgacaccgtcacgaattctgatcactacagttcacttttctgggccttgatgtcatctgtaaagaagcattcctggagtagggatatctgaaagcttttatctggatgtaggtttctaatactattgtagcttaaaatgcaaaagcaaccattagtaaaacacagcttggtcaacagtatctgttcataagttctttcttgttttttaaataatcgaaagaataaaggtaggatacacataaggattctgctttaggtccgtgtataaacttatccaaaacacttgtctaggtatattaactatgcaacaggtacagtagatcctactgatgtggctgtaagatgctaaattacttaaggagtcttagtataatgcaatggctaaacatcaaatgcaccagctacagctctaacaatgtgcacagccctgcatcttctatgtccattagtctatcattttcacatggaagaaatggtcaagagatggagagtgccaagaaaagttctatggaggacacaagtattattattacattttaccaaatgacactagaggcttcacatttcactcacaaataccccctaccttgtaacatttcccaagacttcttgtcacttccacaaacaccctcccctcccttctagagggaaacagaactgttgccaccaggctgtaatgactagtgtgtcaagacctcagtttctgacatgggtctcctgcacctaacttgactcctgcgtctaacctggattcctgcatttaccctggcctggaaacagagaaatttacaggaaagttcaagtgcccaagtcttgctcttacccttgaacataaggaaacagaccaccccagcatcttatcactctatacacacgctggcaattctgaagaagtgaaggaaaaagaatggagattgacagcagagcttagagaagcctaaaccatttcacaaccattatttgtctcaagtgaaaatccttgtctgaactagcaaacaaacagaaacaaagcaaaacaaaaggtcatgtagtttaacatgatgaatgagtcaaacaagggctgagggatatagcttactggtagaatatgtgtccatgtacaaggccctaggctcaatccttaccattacaaaaggggaatgagagaaagagagaaaaatgaaaacatcaaaacaacaataaacaaacaaacagaaacagaaaaaaatgtcaagtagctgagattcctggcaggaaatggctgagagagtcgcaggacttcaaatattctcatccatttctccaaagcaaacattgctctctcaaaatacaagacaggccatagaagtatcaggagtaccacttactagtaattaagctcttagtgtaatcagttcaaagtttccatcaaaattatgcatggcaataaaaacaaatgaataaataatcagcaaataatttaaggtcttttaaagaaagggtccttcttaatttttttttttaaagatggtgacatttccttgactctgtctctcaggcctcacctaaatgggtggacggatagatagatttcagacagatggacagatggatggacagataaacaaataaaaattttaaatccccttaaagacagagaaactgcctggtattggaaacctagccaactaccttgggctagggaagtcatgcttcttgacagagaacctacaaccactaatttactaaataatatatatagtccataactatgctctaaatttataccaatagataagcatagtgcttatccctcatcaaggaaatttctctttgtagcataaggaaaacattgcagaaaaccacaacagttcaaaacacagagttgtggaactcagttccaactgagccatctacaacacaataactgcacctacagctcagggaccattgtagacgaaggcttagagactgtaagaggtagaggatctgggagtttgctgtgagattgtctactggcaatgtcagaagctacacccataaagtctcatcaacatgactaccaaacatgagctgagcaaggagaacaaaagacatgccagaatgggagaaagctgaccaagcctcaaccctagacaaagatctactggtaactaagaaatgctaagagagcatgccaatttgttatccaaatggtaagccctaaaaacatatccacaggttgtactacacatacatacatactcatgatataatttattacagtctcaaagaactgaaaagtcttaatgtaaaaaagttaaataaaaatggctgagcacatcgctggccctaagagtcctccacactctagcagctttccctgcagctcctctggtttccctgcactggtaaaagtggatgatatctctgccctggccctcactgctgcactgggtagcaagatcacattaatcctaggagactctcttctacagttgtgaaaagttcccctgctgatgatttgtcatgaaaaacctactgctgtgaaagacccaaattcacaagagagagccaagaccttcaagcaagagaatctcaagaggctttgtcaacagacagaaggacctagaaagctcttcactgcacacaggtccactgatatctagaagccagacaacgctgtgctgtcaagcagtttaatgctttaacctgaaaattaaaatggtccataatcttttcctgccccacagagataatgatcttgaaggcaaagaaactaatagatgatcgtatctagtcttagagattttatctgacacagcctactttaattggtcaaaaacatattatgttccatatttctctcataggtgaaataagagttttcataatttattttcactaaacaagaataaaaataacactgagagcaaggatgatgtaagagtcaaacaatggcaagctttcaacttgtttttaaaacttgtttatcataaatttcactattgaacagaatcaacccatttagatacctactgttctcaggtaaggggtactgattttttaaatgggagaaatgagacataatttgttagaagttcctttatattttgtctgaaggcaaatggaagctaccaacaacaatttatggttatgtatataccacatacatcgaataacagaacatctgaacacttcatcgggagtcagagttgaggagtctctagcttaaatctgattttctaacacatgacttttttactgcattaaagatgtaattttgtgaactcccaccaatgaacaaacagtcttgatattcttgtacaaactcaaaagagttataacgacagggtttttaaaaagcaggtgaaagagaagtacagggcccaggaccgctgcagccacagaccttagtgtgatgggcatggcccaaagttgatccagataaaatcagggctcaaaaaaaggagaagggggaagaatggagtagaggaggagaaagacagaagggagaggaggcagaagagaagcgggggtggggcacaagtccaaatttaatactagaatcaagtttcaaatgtcttactccccagagcagccatgtccaacccttggcattgcaaactgatgttgtcacttacaatgtctacaaaaaagactgcaaaccaactcaaaggttaagtgagtttatgaccttatgttggggcactttcactgctaccctgagctttcaattcatctgaagtactataggtgctgtgcttggagaaagaaaaacatgcaaagaatcttggtgttacactaactaaacgagtcctctgaaaaagcagtccaagaatttgcttttgttttcaattgtaccatagacaaaacatgccactaattcaacagtctttagttttctgaataaccaatgaatctttgattagttaactatactagtgaatacccccatcagaaaatgttttatttaccatcaaattaaataccttgctttactaggtaatggcattcaagttgtcatcaaaatccatactgtgtgcctagcacctactccaggtaggtcttggatgttctcagtacagctaaggaagagggtggggataccagggatgagggatacactaagtggatacaaccacaatataacagttctcaaagcatcacactgtaagtagattaagactttgttggttatacctcaataaagcaagagggagaaaacctgtttcccaataaattcttggtccacaaagagggaggaaggaaaaagtaaacagcttacctttttgtctctggtccttacttccccataaaaatctagggcctcttgtgcctttaaaaatttgccccgatgcaataaatatgcacaaatcattacaccagtccgtccctttccagctttacagtgaattgctgcaacatgattgtcatcttcacttagccattggtcaagatcttcacagaagggtttgataagttctagctgtggtgggttatggtcttcaaaaggatactgtgcaactgttgcaaaaagataatcccagtgtaagaaaattttaaattttttatttaaaaacataggttaactttcaaaatgttatatataaacttactggttcttaaaagaagcctaactttcaggaaattttaatttattactaattaaacctagattttaaagaaagtcttttattaattcttaaatgcattcattagacatggaaacaagcattgtgctcttcactccagggaggatgaatctgtgcatgaagggaacacgtcatagcctatcagtacaactgaatccaaatgcacgtcacccaggcctcttgtcaagtagtaacttctatcaggaccaatagcagatattactacagcattgccagacatgctccgaagaaagtataattactaatagagtcaactatggaaaagactgacttttcctatcccataataaaattacccagtgacttgtttttaaaatggtctcacaaacattatatttccatatacatgagattaatcactcacagaaaaacatacaactgaagtaaagtttatagcaaattaagtttcagatttttttcacatgaattaagaatctaagatgtctttgttctctatagtcagagttaagtttttgaaggcaagatgctattatctagaagcaagacttccgttctatcactactggtttttatcttactagtatctgttttgattctatcctattgagatccttaaatcctggtatgaactctgggatgtagctcagttcgcagagtgcttgcttaggatgctcagctctgggctcatccctgccttgagtaaacacacaactgaggatgtggtgcaagtctgtaatcctaatacttgaggagtaaaagcaggagaattgggatcacaagttcaaagtcaccctcagctaaacattgagttcagggtcactctgggacactgagaccctgagacccttgtcttaaaattaaaacaaaaaatcctggtgatattactgttctgattatctgccatattatctaatatgtaaaaactctgacttatcctaaagcaagccatcgtaaaatggtacaagaacaatccatccatttactcctttccatgacaggaaagctctgtggtaaacaatggcaaactacattcaccaagaggctgcaggccagcttttacttaaccatctgtctaactgtgctcccgacctcatttccccagtggcacacaagaacattcaagagtctgttaaaatgtacatttaaagctaagtgaccttcaaccatggcatgtttcctaatgagcagtagcctaggtctgtcggtccccagaaactgttcttacttactccttagtgcttcatgattctgagaagacagacaggcagacagacagacagacagaccaatgctacatcttttcctaactttatgccattcttcgatgtagaaaagttaaaatggttctgctctcttcttgtgattgtttccagcagcgctagctgtcccacaccgtcaataagcacctccaatcctagtttagtcttgggacctctccaagtattctgtgatttagttttcctgacaatagataggtcttaaagaacaactctaacattaaatacactttttttaattgtcaaaggccattcttaagatttttatctcactaatcttgataattatcaccaggcagtaaaagacaagtctattggtctttagttatacagtatgctgtggttatgtttatacatacctctgcagttaaatttggcggtgtcataatgtctctcagcacatctacaagaaagtttaaatgtggcataaagttacctttcacactggaaggaagagtatcaatattagcaatatttatccaccctttctatcataccaccttttctatcatgtaaaaacactgcgctaagtgtttttacagtcactatttccgttaacttcaagaattctgaagtaggtactattatcattcttataattaaggagaccaaagctttaataaaagttaaacgcatgcatgcaatttgtgtgcatatatttgttcacagaatttgtgacatcaacatgcaacactgtaaattcaactgcactgaccctgtaatttcttggataaagactatacatggctttagaatgtattttttatttcacaaatacctatgaataaatagctactcttactattatctttacctgacagatgatcacatacaatcttaaaccattacttaaaacatacatgttaaaaataaagaaaaagaacaaaggaaatgtaaaagacaactgaatgatactaatttaattattaacacaatgcttactaaaaattgtaagccagacctttactcttttatatacaaatctcatttccaataatctctcagagtacaaaatttaataccagatcacaataaaataactaaaacccactgatagtaaaatactgacacattaagacaaacacttagcttttcaataataacactaatcagtgatactatgaagggtatcctacatattagtggggtcagaagcatcctggtgactccaactactaaggaaatcagacacttaagcattattcaaataagctaggagtgttaccacaggctgtaatcctagcacttcagaagagttactgggaaagattatatctttaagattagcctttgctatctagtgagtcctaggccagcctgggatacaagaccctgtctcaaaaaaaacaaacaaacaaacaaaaagaaattactgaaaaataaaagttagtgttttaaaacaaagttccattattccttagcccaaatctcaaactccaaagttataaataggtaatctcaactcgaacaggacccaatctgaggttgttcaaccaacatacctgctgagtaccgactagtctaccacagtggatactagagtaacacaaaagatatggattttcttgttttatttagttttttagttttttgaaaactgaaattttctatgtaccaaaataaaactgatccaagacttccaaataaatagctgtgggcctgcactgggcatctggaatttgtacaactcaactgtatttcaaaacccagttcacacaaagattgaacaaattatccataaactacagcccaatggagcagacctgaggggaattaacttctgtattcacacacacacacacacacacacacacacacagacacggacacacacatgtgtttttcttttagtgtattacctgatgtactgtttttgaaaagagaaaatttattagatgacgtatgcatccttgctaaatactctgctaaatgtctgcttacctaaaaatgagataggaagaagaaaactgacacatatacaaaagatcacatattctatattctctttcctcccttcctctttggttttccttgagtcaggatctcatatacccaagactggctctgaattcccttctccctccacctccaagtgttagaactccacacagggaagccaggttctgctcttctgagaggtgctgtgtggtgaagagcccacagtggaagacagtcaagaattaaggatacaatcaggaaacaagaggaagctaggcacataccctaagaagccggttgttagtgtcctacaagtcagatttttcagtttgccacactttctggtctagggtcagggatcccaattgcctgcggaggtgatgcagggaaggggagaggaggggaagggagggtcccaccccagagaaagatggaacaaacactctgaaaagtttggtttaataagcactgcttaagatcaccattacaaactggttgtcatgtatcatcagttaaggtgaaaggaacacagtaacaactgaagtctacaggatatgggcaccttacagctgacatccatgttttcaccctcacaatcatgtaacagtttacatccccattgtatatgtgaggcatatgtatatatggaaaagctaagatttagaaaggcccttaaaagctttcctaataacaacatgaagtcaccgtgagacaggaactcaagcttagtatccttgctcaactaaatccaacaacttctattacagtttcattcaacataacagaaacattcaagtcttaaatgaaaaagcagtgacaaattttacagcacaaacatgagcagtatttgtcactgaagacagacctaacaattgacttggggggggaggggagcatgcagctccttataggcaagcggaggggctttgggaggacatgctagggctgcctgtgaaacagtgctcaagagaaagaaagggtcacagggtcaagaagaaaccttccaccttagttagaatctctggtatatagccaaaattcacagcggagtttcttttaaatttcttatggcatattagcagtaagtcactccacatactaaaatagaagatagcaaataacaatttggatttaaatttttctttgtaattaaaactcaaacgatatttttgtccttatcttaaattggcttatatgaaaagagaaatgaaaaaaaaaaaaaacaaggaaaatgaggtttcccaaggtggcaacagaaattaagaggaggagtgaaaccagaaaggcaaacttgcagacaactaggccttgccatagaactacatggtagggagctctcttcttcactctacagtgttttacaaaggaaatcttaacagaaaaataacacagttaaatgtttgccaagtacagcaaatattcactaaaatataataaaaacttaaaatcttgtattctctgaacagggagcaacaaagaaattttaaaaacactcatataaaactgattaattaatgttgccctttttcaaaataactgattaataataatagataagctagattatcagaaagcttaggctgatagttcttcattcatgtgcaacactgctgctataaaaggtctcacaaactactaactatacagatgtccagtgaaaaatactttaggaccttcaaacatctacatttccaagaaaaaaaaaatacatactacctgtaattcctatcctaagacaaaaagaaataaaacaaaaacatctgttgtggctagtctcacttgcctaaaatcagatacacagtaggcaggggagagggggtactcaaattaaaacactcaattttgtatatgtttaaaaacttttgaagtaaataaaacgaagagctaaccagcaaacaaaagggattctggtgcaaacagtgggtagtctgttattatgcacctacctgtctttggctacctcatttaacttcctaggcctaatgccctgtctataagataagaaggcactgctaaaaggacccttcagatcctttgccattctgaaagcctcagttccaaatgacaagggaataagttcatatgcactaaaggctgctctcaactaataaagagatggttcattaaattgggaatcaaatgcttggaaactcaaatcaagttcctaggtccacccaatgccacctctaactatactgaaatacaacaaaggagacagcataaacctaatccctaaattctaggggcaggaagtcactataggcaggaatgaaaagaatttcctccctgtgctttagatatgttaaacaggcataagatttcagctcaggcagaaatgtgtcttctaatgtctttctacttccctattgggacctctctaaatccccaaacctgacagtgtgagtctgaaatgattcatttcatcaattccagctttcaacagttcttgtcctttttcagtcaccttctgaatgcagctgttcagaaacagtcttgtggttctcctatccaccttttattagcacaaccccacctaagccagcatacaccaccacctgcccaaaatgagttatctgccatatttcaaataccattatactatcaatcttctgacttgccttggctcatcctcccaggtctaatagataactcctattgattttcattagtagaaaagccatggaaatatttcaagatctttaaatttatgtttgcaaagaaataatcttaaaattaaaagaaataaaacagaaactcctcttagtcttacaagtatataacaagcagggatagaagaaagaaggtatcagaagttaatcacagcccacacatctggtcttttacagaggcctcctgtggggccagttactttgtccacacttctctcctgctccctcctactttcacatcaagctataggctactagagggctggaactagccatatgagcactctatctgcatgtttcaccatggctgcacctttctgatctgaagtcagcaaaagcgaagagaaataatattggtaactattgcacatgaatactttgaagtcttatcaaaacagaaatatcattaaagactgaaaaaataaaagtaacatctagcactataacaagacatagaaaattctccatccttctgggtagcaattcaaatagccactcgaagcagaacagaaaacacttgtagttatatttgataaagtctacagaaaatggttaattactaattggtattctaccattgcataacattctcctgttatataaatcatagacatagaaaattaaaggacataatagaaacatggtaatttatcttttaaatttttaaaaatgctcagtatttggggaaaataaaaatggttttgaaagacaaagggtgtttaatgatttgtcttcctttcctgttttcatgtcactactccaaaagtcaaaagaaagtgaaggtttaaagataggccaataagttttaatgagcaatccctcaaatcctatactagataactaaacaatgctgcataacttactaggttatacacagaaaatattcaaatagctgtttcagtatattgatcaacaagcacagaggaaacaaaagtctgtccatccaccctggagtctgtctccttagaagccatcgttaatactaacagcagctccgctgtggattacatttcaaattatcacatgattatgggctcaaggatgggcgaggtgccaagtctgtaaaagcagatcaagtaaccggaggctgtgccaagctgctgcacctcatcaccacgcttcgagacccaacaactctctctatcagactgcaactgttttcaggaatccagttcctcaaatataaaaatatctaaatatatttttatcttcaacaaagaaataacttttatttagttattttaacagagacaaataaaaaaagcatacttacagattgtatatcttgtaatggtttttatgctttgaatccaaaaaccttaaaacaaaacaaacaaaaaaaacaccattaacaaaaatgagctaatatttcaaattacattaatgctgcacaggactaaaacagatttatttacccttatctcacatactattaataacacaaatacatatcccctcattcattaatagttattacattacacagatttatacattctgaagtagagctgactttatcaaaaactgttttcatatctatgtcttcagtctaataaattacaatcacgtcttgacaaaacgatattagcagttcaagtgtacccagctcacagacttccatgaaaaaaaaaaaaaagcttaaaatgtaatcttcctagcagggaaaaaaaaaaaaacccacaatctgaaaagtacaatagcaatgtagttctgtaagcatttttcacatgtatacatgtatactttctcttgtccctgaccaacatcgcagagatggaatttacattttacaggaaaaggaagtaaacctcaagagattatgaagcttgtccaaggtgtgaagctagtaaatgaagagtcagagcaggggccactccttccaaccagctgtgaaaccacacagtgatcacaggtaccaaagcacctattacatgccaggtattatttaagtactttatgtatgtaaatttgtttaaccttcaggcctgaaacagaagactcagcaaggtataatggtgaagaattaataatgagacaaaaggagaaaatagtttcatgtagcccgggctggccctgaattcctgaccctcctccctccatttctggggtgctgggactacaggtctgtatcaccaacctgggtttatgcagtgctggcaattaaacctagagcctcagcaaaacattctgtcagtttacatctccaggtccaacatgagttcccaagatgaagacataaatagctaataaaattgactttaaaaagggggtctaggggagccgcaaatggagccatatatatctacgttatttctaagtgccaaagagaacaccagaccctaaagttggcatggaaagtagacagcataagacaaaacgacaaacgcactgccattaacactagcttcctaaaaacaattatacaaagtttgatttttcagaaaatttacttccagcctagaatgctatacaagacagactataaatcgtgggtgagtatataatacaataaaggcactgttctacaacaagtcatttgtttcccatacactatctcagttgtaaaagatgttgagagtgaaaaatcataatcggttctgggaaccagggagcccaacctgtaaaagaagtgaggaccccaaggatcgcaaggggtacctcaggctgcacacacagaaggcaattaggtcagagttaggtcggtcaggaagacccaggagtacgagaaactgatgagcaccaaatgtgctcaatcactgtgagatttacagagcagggtgtgtgtgtgtgtgtgtgtgtgtgtgcgtgtaaattaaaaccgagaacatagatctcctggacacatagtacggtttccagttgtgattttataagagttctatgtgtgcaaacacgtgtctctgagcctacgtgggtcttgtgtttttcttgtttgtttgttttgtcctattccagtttgtttgcttactttatttcactctattagtttttagacacctgttttctaatgagagacagaaagggtgtaaatctgtatgggagaagggagggaaactaggaggagttgggataggagaaaccataatcagaatattgtatgaaaaaatatctattttttattttcaattaaagaaagaaaaccaagcagtatgacacaatacatttgtgtcacagtcaggttaccaaagtgggcacatcctcggaatacattataaaattacaagaaaaatagagcaaaatattaggaatctggttcttttaacttctgaggtttttctttaaaaaaaaaaatcttgaaatggttggttagttctcttttataaataatttttagaaggaaactacaactctggaaatgtcaggaaacagagggaaagtgttcatgtaattctagagctgacatcagacaaggaaggaaatgctggcatagtgagataccatactggactgtaaagcattgcaaatgcttcgcctcagcagcagcctaggaatctacaacccaatctaaaagaagactacagagaggatttaactgtaatccatggggaactataaactaggctcatttgtttaaacacagagggaaatgtaattttttaaaagacaaaacatgaagtcatactttgatgattcaaagaaagaaagaaagaaagaaagaaagaaagaaagaaagaaagaaagaaagaaagaaagaaagaaagaaagaaagagagagaaagaaaggtcaagcccactaagtgacatgtgccatgcatgttaccaccgcacacatgtaaacacagccaggtctatagaactgagtttgaagtcagctgggattagagttggacaccatctcaaaacagcaatcacagtaacaatgctatggacttggtaggattctctagaattctcttttgtaatgaacaaattattcaggaaaaaacacttagctgcagagagctcacaaagctccattttaaaacacggtcatcacaatggcagaaggagtgctcagagatgaaatcagaacagcacaaagtggtgtataagaaggaacacaaaaacagtatcaactaaaggttggagtggagcaacagaacaaaaagaaactagaattccatacgcttgactggtgtataatgctggaaacaggaaaaaggcagggagccctaaacctttcacttctctattctctgtccaaaagaaaaatgccgagtcagtagtaggagatatattaacaattcctcataagttaaatcttttctacttgataatttaagcaaagctgcttcttgattatttaagagctagcaatagaaaatatagtaattatatacaacaataaagcagagttagcaatcagttattctgagcaaaatataacccatcaatttctttagtcaacatttatctgaatctaagggcacagaagggatttataaaggctatattataaaggcataaagaaaggacttataaagcattataaagctgtgtctacaaaaggaatcaaagcagtttaaacaatttaaaagaaaactcagttgaaaagaaagtcaacacaaagtaaacaccacgtatgcacacaatgccccacagaagttaactgtccgaagctttggaagctagaaagtccaagaacacccaaacaaacaaacaaagaccacggcttcttatatgtaaacacagctacaaatttctgaaagggggatgaagtataaaaatttcataaggaaattgtgccacccttatgtcaaccagttagcaaacactgagatcagaggcaggtatttcttttctctttcccttgttgtgagacactcactcctacagagtgggcagcaaggtacaagagaacagtagattcttcaaagatctcactggaagacctgggaattcacagacagcaaccaggatgtaggaccatgcattggtgtctaagcagactgtagcccctacaccacgtttcctaaacttctgctttccacaatgggaacttcctccagagcattattcctttctggtaaagacattttatgtcatttgcaactaaaaactcataattctttcaagagtctttcctaccgtgtgtttaccttaggcttagggaaatcctatctgtgtgccccttaacagttgaacattctgatttcttagctagcatgtgagcaacagcaagtctaacagaagaaagcagccctttaatgggtacagtacatcattccatcatttgaaggggtggggggataactgtctcaaagagaactgattacttagggacacattccgcacttcccccactgttctctcagtctgacacatagaaagacaagtgaggaaagacaagtgaaacagcacattccaaagagaaatgggcaaacttgcctacagagatgtatttagatagtagaggctaaaatattagacagcagtgagaggcaatgctccctaaccctgcacgacctaagacacctcctagaactgcatcttccttgaaggaactgactgcacatcgccctcaccactctcaccctcctatccctgttgagcctcctttccaactgtggtgtgtctgtgtgtctgtctcacatcgccctcaccactctcaccctcctatccctgttgagcctcctttccaactgtggtgtgtctgtgtgtctgtctcacatcgcctcaccactctcaccctcctatccctgttgagcctcctttccaactgtgctgtgtctgtgtgtctgtctcactgagataaactgaggctgatgtatgagcatgaaagatttcttaggaaataaatctagataagccacaatagtgaattttaaatttattttatataaacatgtatttcaaatgctagaaagtattaccaaaaatccacaacaaaacaacaaaaacaaatcttaaaaaaccccacaaaacagaaacaaagaaaccaaagtagttcaagaggacagagaagcagccccagaagccagccctgaccaccgactgcacttgcggaacctttcccagggaatctaggcaaacgctgacactttcagtgagtcagctctgacagaaaatgaaggttaacttaaacaattttaggtgtgtgtgtgtgtgtgtgtgtgtgtgtgtgtgtcatgggaacaacaggtatttctctatgactttgcaactagtctgtttttgagaacggttccctcactgaacacggagctagttattttggctaagctaactggccagcaagcccccaggatagtcttctctgcctgcttcctgtcacagaggtcgcagaaacatgctgagcaagctggcttttgtatgagttctaagaatgggaactcagtgagactaggccggggcctagcaaacacagaagtggatgctcacagtcagctactggatggagcacagggcccccaatggaggagccagagaaagtatccaaggagctaaagggatctgcaaccctgtaggtgcaacattatgaactaaccagtaccctggagctcttgactctagctgcatatgtatcaaaagatggcctagtcagccatcactggaaagagaggcccattggacacgcaaactttatatgccccagtacaggggaacgccagggccaaaaaaatgggaatgggtgggtagggaagtggtggtggggggagggtatgggggatttttgagatagcattctaaatgtaattgaggaaaatacgtaataataaaaaatattaaaagaaaagaaaagaaaagaaaagaaaagaaaagaaaagaaaagaagagaaaagaaaagaaagcatgctgagcaagccagtcaggagtgccccttcatgctctctgcattggctcctgcctccaggttcctgccctgtttcagttcctgtcctcattacttttgataatgaactgttatatggaactgtgagtaaaataaaccttttcttctattaaaaaaaaaaaaagaacaatgggaactcagaatagcaagaactttactaagggagccatctccacagccctgattttagctcttatacaacaaggacttctcatacagtcattgatatacctctatagagacttacaaacaactttcaaaagccaaagttaataataaatgccgtacgttccaatattttaaatctgtgtgctggtcactaattgctgcttttgaacacgcatacgtagatggaggaagctgtcgcccaccaactgaagacatcaagggattttaaatctactcgccctgcccacttctttttccttcctttggatctttcaaagaacccaacatttaaagataataacaactgagattaattacacatacaaaaaaaatttaggaagtcattccctatacctagaaaaaaagcccaagcctaaaagatctttaatttattatgattttgtgtatttagtattttgcctgaatgtatgtctgtgcaccacttgcatgccactagcatgtagtgcctgccacccgagtttagaagaggctatcgggtaccctcagactagattggcaggcagttgtgagaacagccagtgtccccaaacactcggccactgctccagccccaaagatcttaagtttgcatgagtttagcatggtaatctttgcataggtatagcatagtagatacccaatacagaaaacaagggaaagctgggccatcaagaaaagagagaggatcttcgaccctacaagatccagattgtttttagctacctccccccatacacacacacacacatgcacacacacacacacacacatacacacacacacacacatgcacacacacacacatgcacacacacacacaagcgcacatgcacacacacacacacacacacaccacatgcacacacacacacacacacacacacacacatacacacacatttacaagaccaagacaaaaacatacatgcatacacaagtgtgcatactcacaccccaaaataagatgtgtggatactcaaaaatcgaataagttaaaaagtcaacaaactgtctctcagaaaaaccagaaagcaaatttactaggcaaagatttgtgtggtcttaatgatactcagaaagctaatgaaagacaggggtatgccaggcgtggtggcgcacgcctttaatcccagtacttgggaggcagaagcaggcggatttctgagttcaaggccagcctgatctacagagtgagttccaggacagccagggctacacagagaaaccctgtctcaaaaaaagaaaaaaaagacacgggtaagatcaagaaaaatgatgaacagaagtatcaataaagtgaaagagaaacaaagagctaggtgtagtggtacacacttgtccgccagcattcggaaggctgaggcaggaaagtgcagcttctgagttattaacaagatgggtagctgagaagataaaaaaaagataactgccaccaaactgaaccatgcagtaaaaggaaagaattataagttgtcctctgacctctaaaagtgtggcatggcatagcacacacacaccccaacatacaaaaacaaataaaaaaattttaaaaaggaaaattccaggactaggaaggcaccttagtctaagtttagggtcccagaacccacataaagaacaaagcacaggccaggcagtggtgccacacgcctttaatcctagcacttcggaggcagaggcaggtggatttctggtctacagagtgagttccaggaagcaaggggtatacagagaaaccctgtcttgaaaaaaagaacaaagtgcgatagcacatacttgcaatcccaacatcatggctactgccaaggctactgttttcctccacaaccagatggtagtcctgttgcttaagatactgcttacttgtgtcatcgagcacagagagattgagctgacagccaactagagattcagcactactgactagcactcgtggtgctggaaggtacttttgcacacgactggaagataaaagtagtcatcaatataacccagctacaaactctgtgacccacaacaaagacctgcatgctcgcgggcatatatattgatccaatattggcataaatgttatgggaacaaacaaccactttttaaaaactgaatttaagacccattccttaaaatagaacccatgcctgccactgctagtgaggctaagaatttaaggctagacaagtcatgagcctaggggaaaacctactactactattattctattaaagaaacagaaatattcctaacatactgctctccctatagatgagtgtgtcactcatcagagaaaattctttttgcagtagatggtgattaacacagagacccacaactgaagagtgtgttgaggtttggtctgttgctatgtatagcaatgctgaattctgtactaaaagatttagacctacaagtgaatttcacatttaccagcctttgctgtataaaccttacaccttaatttaaaaccgttaaggtttggtctgttgttatatattgtaatgctaaatattggccctggttacctctgggccaaggtgatcctcacatacatcaaataatgctctataaccctgaaagctatccttgattggtgaatgaagatgcctacagcttatagctaggctgaagagagttaggtggggtttgggttcccaggcttggggtctgaggcagaagatcaggaaacaatagagagaggagaagccacagtggggttaagtgattcatgaaaactcggtcatgaaggctggccaattggagttaagagtggcccagatgaaatatggcaagttataactcagggctaccaataaggaagtagatactaatagcctagaaggtagataccagcccagctttagtgctcattaaggcttataaataatttttaaaagtttgtgttttttatctggaaactgaatgatctaaagcagtaacccccacatgaaattaagcatatacatcaacacagcgtacaaatggagaggctttggaacactcagtactaaatgggatgcatttattgaacccctcccctcaaggttcagggatctactccgaggaaagggaagaaagatgggaagagctagaggtagtaaatgagtctaagcaaacagcatcttccagacacaacaagggtgtcacacaaactcacagattgtttcagcatgtgcaagatctgctcaagtcaaaccaaacaaaatctcagcactaaatctgaagcagacacaaagccctgcctctaaccaagaaacgatttgcagttgattcctactgagaaacagaagatcagttttctccaacatatcaactacgctccaatcagcgctcatgcacaggagtagttggccaacatagaatggactccatggtttttgtgcttttctgttttgttttgtcactttttgtcttattgggttttgttgattttcttttttttcttcttgagaaggaaagaaaaaaagaacatgacatttgtcggaatgggaggtgggaaaagacctgggaggagttgaagaatgggaaagaatatcatcaagatatatgaaaaaactcttaataaaaatttaaatagaacaatacagtagttcatacttgtaatcctagccatggctgaaaagtacagtcaagtggaataaaaatgtttataggaataaccaaccaccttttgattagatttaggtctgttctataagatggaagccacatctaacattgtcaaaatgaggccaaaagcctgtagctagatgggcatggagcctagggaaaacctaccaatattcctcgggtaagtggacacagcaatagaatgattgctaatgactactgctaaataaaccacagacagtgcacagctcaaccctcatcagagaagcttctgttgatggcaattagtacatacaacctgcaaagaaagacttcaaaatgttcagagcaaatggtattctgcatcatacccttcctttcaaggctcaggcatctatgtggaagagggcaggaaggctgtaagagcaagaatgataggtgacttcaaggagacagcgcttgctagacacaacaggccagatgcacatatgaactcacagcaaccctaacagcatacacaagacctgtgaaagcacaagccaagcaaagaaaagtgatgaccaaagtcccatccccggctaaggagctattggctaccaagagtgagaaagtcaatcttctttcctggagtaaaccacattccacacccaggaactagggtaggaggataaatatcaaaatacagaaagcaacttactgaagaaacgtaaagagattaaccaacctgtgagacaacagcaactggactaccttagggatctttaaagttccagaaaaataattatatacagaagtacagtcaaaacttctcaaatttgataaaagaatataaagaacttctggctcaatgaaccacaattcacaaaaactcagagacttactaagacagatcgcaatcaaaccatcacaagacaaagacaggctgggggcatatctcattggataacacaaacagagctctgagaaatctgtccccatctctacataaacctttgatggtggtgcactcctgaaatcagagcactagtcaagtggaagcaggaggatcaaaagtcagttagtacatccttgcatatatacaaggactccaggctagcctgtattatgcaagaccctctcctgagaaagacccacagtctcaaatacagagagaaggaacatgtcacaaaggagcgttggtatcagcagatttttccccctcagaacaggaagtaagaatataacatttaaggtcctagaaataaaaaatatccagcaaaactgtccttcaaaaaatgagaaataaattgaaatattcccagagaaacaaaagttacgaaaacttaaaagaaatgctatagacagcccttcaagtggaagtgagagaacatctgcagcactaaggtttaacaaggaatgtaatgtatcctcagctgaaaccttacactatacacacgccttccatatggctgcctgaaactttggacagcgacaaactgtatgtacattttccatatacacacttatcaatgaagttgaataaactaggcaaggtaaaacattaacagtattattaaaatataacaactttcaatataatgaaagttatcacagcaagaagcatggtggtgtccaggattctatatcttcatccaaaggacaccaggagcagactgtcctcaggcagttatgagagggtctcaaagcctaaccccaaaatgacacacacacatccctcaacaagaccacacctcctaatagtgccattccttgggccaggcacatttccagcaatggaaacctcactaagaaacagtccttaatggagaaatggtaacaatttaatgccagagagcattacacaaccatacttgatccatcacacaggaatgttgaattcagttttgacagctctttcagcttttaaaaataagctagaaatacagggttttgcacgaggcttcatgatttttaagtatagtctcgatttgtccaagtgtttctagattttgtcctttgatgtacagaaaaaagatattaagggaagcagctttaagtaatgcccagtggtgaagtacctagtaatgactgagttcaaactccagactgcatccctcccctggttaaaaaactttttaaaaattgaatttttgctggccagatcaccataagattatacacagagcactctgagaatatggaaccaggaggaccttgagttcaagactggccttagctacacagtgagaccttgccttaaatacagtaacaaacaaaaaagaaaaaaaatcaactttggaatctcacagacacggactcaacttccagcttcttgctacttctaagctgtggcaactgaagattctaatttcttttaaggcacttataaaagtgaaatagggattagattccgtctacaaacttagtaagatggtatatgcaagctcgttatacaatagttaacagatataaatagtaaataaataaatgtacagaaaacagtatccgctattaaatagcaaagctagtttgtgcccataacattattattgtccaacacactaaatctccccatgtgcaggaaagacagccagcagaagggaagggcagccaggagctttcaggagtgataaaaaggttctggaatttggtatcggtggtgactgcattacctctggctatactgtgaaaatattaaatgtcactcaaattacagtttaaaacagtgactattatgttaactcactaatttttttaaaatggaaaagaggaaggcaaaatgaggaaaggggcaaaaaaatgttagaatggaaaaacagaagtaatctttcctgtttattattattattattaattatttccttttttttttttttgttttccaagacagggtttttctgtgtagccctggctgtcctggaactcactctgtagaccaggccagccttgaactcagaaatccgcctgcctctgcctcccaagtgctgggattaaaggcgtgcaccaccaccgctcaacatttttttttcttgattttcaatgagaaagaactatttgttattctagcatcattattgactatcaattaaaaataagacttgaaaacattattcagagggccattaagtaatgaatagggctgtgcagagttggtgcacgcctttaatcccagcacttgggaggcagaggcaggcggatttctgagttcaaggccggcctggtctacagagtgagttccagtacaaacaaagctacacagagaaaccctgtctcaaaaaaaccaaaaaaaaaaaaaaaaaaaaaaaaaagaattgaacatttgcaaagtttcttcagaaagaaaatatatatgccagcagtcaagaaacaataagactcttgaacctgtaacaggttatacatgggtttacaaaacagtaatagctttttgttaaatcattatgtcacaagactgagctctaatcatttccttataaaagctatagacaaactgggcttgatggacacccataggcaggagtgtaaaaatcatgaattagaaaccagcatggactatacataagtcagcctgggtcatatagcatgcctccacctcaaaacatatcaaacttagaacaattctgtacacataactttttcattttcaacattttccaaattgagctccatgaaacactgtctaggaagatgagagttagcaaattataaaaggaaaccaagagaaaacataaaggtggggaaaggtctacctggtggcactgtactaaacattttgtgtaaaaagtagtttgcctctgttacatctacattttcctgagtcattgggcagaagagattacaagacaagctccttagacacactatgccccagtctgttcacgactgcttagatttaaagccacagagctttcccaccagcctaaaggacactggaaaagcacaaatcaagccaagtgctggtggtgcatcaccccctcttcattgcaaaaaatgaggaaaaaaaaaaagaaggaagcagttaagaggaacgacaacaactactgtgggagcctccgcagtccctcctgccctgcctgccctgtcagctcactccttagattaaaaaaagcaaatcatctgtaattagaaagcaaattccaagcccagtgttcctccatttccattttttacatgaatcccagatctcaaatgaagaagctaaatatttttctcaaattttgtagatctcagctatgaaattttacttatcatagcacactatatcttccaaacctttctgcataggacaatttaagcatgaaaatatttgcaatttaagtttacctcactccaggtaacgctatagtacaatagcaaagatttaagttttatatatttcttgtttgggggaaatataagaaaaatatggaattagataaaagaaaaatagtttaaaatatcttttggataccctactagacaaagcaaagaaaaattaactgcaaaaaaaaagtttattaataagaaagcaaacatgttatagtttcaatctgaaatcctcctcccagcccggttgtggagcctttggaagtgaaatctggctgacagaaatcagtcagtcagggcaaattatctgcaggtttctctggttcctgcttcctttcacagccatgaggagttactgcctccactccttccaccatgaactctgccccaaactcaggaagccatggatggagggatggagggcctctgccctccctcctcaccctccacagccagaaagccttctcaaacaatgaggcaaacgaaccccctcttacatcacctgcttcttctgggctatctggtgatatgaaaacaaaaatacttgtactgagatgttatcaactttaaagcaaaaggaagcactcactattgattaaaactaacatcaccaatatagtgtgaacaaactgaagtaatcagttatttagatattagacacaagtgttctttggagaaggcaatcctaaaaggcattgtaattcattatttgtaggggctaatgtaatggtgttggctttgatcccagtcctccgaggcggagacagagaggcaaatgcctatgagttcaaaacaagacagttctacataaggacttccaggctagccaaggctacttacttaattcagaccctatctcaaaaaaaaaaaaaaaaaaagcaaacaaacaaacaaatcacaaaaaagttatttttagtcactttagtttgtaggaaaaggcctatcttcctttctagtcactattcatactttactataaaagtgggtggggaactgataaacagaagttatccaggccttaatggtcatttatcttaacaaacaaacaacaaaaaccaaacacagaacagttttataaaaacattaaagtaagaagctaaaagaacaagctaaataatacagatagatttctttaaaagagagagaacacctaaggctaaataaaaaaactagatagataaagctagatagaattaatttccgtcttagttactaattataaaaatgaatgtgcaattctcttaatttgcaagcaaaagtataggaatcatgaaaccagaagactcaggaccaaactaatttttcaacacaacatatttttggctaagttactgtagtataaggtctaataaccaggggtaaaggtctagaaactggaattgtaaccttaaagataatctaatcaccctcacttactaattcatacttaagagaaatcaatataaaattagcatgccagattagtcaaaagaacattacatggccagaaaagatcccctccacttaaagaaagaacttgctccccttttcaatacagctgaatttggtttggttaaattggtccttggctgaatataaaattgatgtgaaatagtgtatcttatgaggcataacatgaaagacataaacaattctgcatcaaagcagaaaataattatctggccaaactgccacttaaccatactctgcaactttcaatgaaaaaatttcctctcttactttttttctgtggcgtatttcattttctctgcatcatcactgtgttcctatcgagctgtgttcctgtgggcctgccatgctaagtatccttccactgtgttctacctaattataagaaggcaaatgtatttccctattgttaaaggcttttaaacagttacctctaacaggataacctaaggtttaatggaaactacaaagcagtaaggggtttggtgttagttttggtagacttttatagatggtgaaatttaaacctgaacaaaacataaacaatattataataaattatccaaacaagcacaatttaaaacagtaaaaattagccacttaggaaactgactactagctcatctaaagacataaagtcatgcagtaccacaaaagcatcctacatctgcatgacactctaagttacaaagcactctcccacctatttaaatctgcataatcacacatagttaaaagcaccaggaaagatgctcacttatgagtaaaaaggaaataatccagaattttaacttttaaattcattaaagtacttcagaaccagcatagcaaatacagcaagactcagtattaatgaattgttaaaaactatgatagtttgcaacaaaaatttaatgttcatttactcatacaattgcatttttattctgaaactaaattttttaagtgggccttgagaaacacttttctgaactaagcaacaatcacacttggaaattttgtaaaattatgatactcttcatttactcttttgaatgaatgtccagcaagtctctccaaaatcattgtatcaaacactgctacaggtataagtgctacataaaacacatcggtcactcataccgcagggtgaataactaaacaaacctacttaagcaaggcctaacccaaatacaaagtcaaaaccttgtactgtaatacaagccagagaataacctggtaagagacatattatggaatacaaaaaaaaaaatcttcatgacataaacaaacacgactatataactagccagttctcatccagtgacgcatccagccgagtgagagctgtcaggtgctttaggttaaaactttcagagttttaccaaaacacatcaaaatgcaaatactggtctgtgttttcgggatcttttctaaataaaacacatcaaaataatttattaatataagaaatagaaaatcaagaatgcttaccttactacatcatcaatattgttcctgtatacaccttcaagtctttctgcaggaaatcccatagcaataatatttggataaatatctaaattattaagttaaggaaatacctagaatatacaatgacacaaatatgcatgcatttgaaaacattagcttttcccacgctagctgtgattataaaaggtcgtcaaatgtacttgtctgctccttgagctatagcctggacagtcagccactcactatccttagacttctataagttcctactgcccacagtgactcggcgggcagtgataacctcatccctgacagctgtgatgtcagaatacgcgactgaggctcaagcctacatgctttcttctcatcagtgtaattagtccttagcatgtccttagtttcaattcaaaaccagttaacataaaaacccatctctatattctgggagaatttatttccgattaactaaaaatctacacttccatgaattttatccatctttctagctctcatttgttctggggttccatctcataactacctacaagattttcacatcaactataccaagttacctcctttaaaacaaccacttaagacctccgcctacatattctggatacatttgccttctacatataactcagtaattgatctccaagtcatgagaaggctttggccataggtactacaaaggcagagcatcatctgtaatggccaagaatctttaacaccaactctcaaagcctttgagaaaaaaaatgttaacttataggaataatatagagggacaggctaaataatattatgcaagaataaatgagacaaattaaaaagtctgtagggccgggcagtggttaccgtcctcaagaaagacaggcacacagacctaccatggcactaaaagtactactgtattttttaaatgaagatgttttcagagggatccgtggaagtatgtataagcatcaccaagtgagtattatgttgggtagcactcacacacgccttctggtgacagaagaaaacacaggagtgtttggagagatgacccagcagttaaacatacttgctgctcttgcagaaagagcatccggtttggttccctgtacccatatcaaagtgaagaccagacacgcatacgggaaagagacatgtttgcaggcataacactcatacacataaaaaataagatttatattagaaaagatatacttaagtggctagaacagtccaagcagagaactgcaggaaagagacagaaatctatccaggaacaagagcccaatgcaactcataaagacacacagaaaggacaggatttacataaaacagacacaggtttagggatgcctgtcaagtagttcaatttactcaggcatatatgcataaatggggtcatagtcaagaacaagggaaagcctgaaggggaaaagcctcgtcatggcctgtcaagtcagcagacatcaagaacaacctacatttaccattactggagtgctttcaacaagggacactgaaagccctaacatgcatgtaacatattacaaagaaaatgcttaagaaagaaagggcaagctgggtgtgttggcgcacgcctttaatcccagcacttgggaggcagaggcaggcggatttctgagttcgaggccagcctggtctaccgagtgagttccaggacagccagggctacacagagaaaccctgtctcaaaaaataaataaataaataaataaataaataaataaataagggctggtgaaatggctcagtgggtaagagcacccaactgctcttccaaaggttcaaagttccgagttcaaatcccagcaactacatggtggctcacaaccatccgtaaagagatccgactccctcttctggagtgtctgaagacagctacagtgtagttacatataataaataaagtaaaaaaaaaaaaaaacaaacaaacaaaaacaaatactaggccagacacagagaaaccctgtctcgaaaaaccaaaaaaaaaaaaaaaactctttgtgaaaagaaaaccgtatcaaacactgacaatggctatgcaataacaacatacatgagaatgtaagcatatacattaactaacttaatttccagtgacaaactttctttttgtgggaagaggggtgtcttagcctgaactggtctgcaacttgccagcaggaaagtttaactcctcttgttcctcctgtcttccctaaatactgggattacaggcaccacacccaagtgccagtaacaccctttgaaacagaatcaacctggcatggtggtgcagggctatataatgcttagctatttggtagggtgagactggaggatcacaagttctgggcctccagggtttaagactagcctgggtcagtgaaggaaaacttgactcaaaagtaaagaaagagggctggagagatggctcagcggttaagagcgctggctgcttgttcttccagaggtcctgagttcaattcccagcaaccacatggtggctcacaaccatctgtaatgtgatctgatgacctcttctggtgtgtctgaagagagcaatggtatactgatatacataaaataaataaatctctttaaaaaaaaaagtaaagaaagaaaggaatggtttcatagctcaatggtagagcactctgccttacatctggaagtccctgggtatccccagcacatttttttccactgaatccttaagttttagaatctctttaaaagtgattccaatcttatttatatctggatatgaataaattcaatgaaaaactttcaataaaactttcaatttttcaatgaaaaaagtattctgaatttcaaataaggtttacttagtttattaagttccttttaaagtcagcaactccgaaatccaaagtaaggtttattgggcatatttaccgatggcttgcttactagtcatccctactagtttcccacccagtttttcttcctagaagttaattatgaaataatgtacctgcaactgctcaaaagcctacatatgtgagcctctaaaacttttaatttctaatgagtttatatagaacaattagcttcttcctaggtctctggaaaatatgaaaagactggtttcctgtttcaaagctctactgcatttacactacattcaagtgtgcgcacacatccacacacaacgctgtctctttggttcacacacacatacacacttttatgcataacactctttggttttcttttttttttttttggtttttcgagacagggtttctctgtgtagccctggctgtcctagaactcactttgtagaccaggctggcctcagaaattcgcctgcctctagctcccaaatgctgggatcaaaggcgtgcgccaccagcccggcatctctttggttttcttgccactaaaaaagccatctaagattgaccactaatgacaaaatatgcacaaaagtgcagaagcccaacatgtatcaggcatattaacaactttatgagaactaaggcaaacacaaactccaaactgtctacagaaaaatcataatggtacacacaagactataaaaactaaagctgtaattgattcaacactaacataaagctataagagatatctctctaatgctctaatcttcatatttgatattagatttctaagttactcctgcaacaggctgcttagaaacaaaacactaagttttagctactttataatcattcaaaagatattaaagtctctaacttacgacaggagagatattcctatgtgcctgaaggatggaccagtaacttgagaacaaagcccctgtcatatttagtgccaattaacttagtagtagctgcatcttgcaaaaataaaaaaaaacccaaaacattcacctgcaatgccttagcaagttcagcactgagaatgaagagactcagggtcctcacgcagtatgtcctgcctgccgatggaccagtctccttcaatttagccaaaattgcaaaatttttagttgcttttaacagtcaaaattttacccttcaaagcagactttgagactatttaaaacagaaaaactccaaatctgtgggctgaattagttcactttacatatgactttgatgtaatacatgaaataaaatgtttctttaccctgtattactaacatagaaatcaaatgaaatggcttcgtttctattgcaagtggtataaataaatttgcccctatggactgttttggactgaagaaaaataaaatgaaccggaagtaattatgtagattttaaatcatgaagacatatatactgtcactcattactagagtagagtcatattgatgattttataattgccttgttttaatattgtaaaaggattcctattcccactgaaaacatttaaatcattataatcaactttgaattataaaattattccctgaactgtgaaattgtattttaaaatatgctagttaaaattcactttagaatatgaaacttttctattaacattttaactgtattgatagatggaaagtaagaacaagtctttaggggctgggaacatagctcagcagttaagaacactggctgctctcccagagatcctgagttcaattcccaacacccagatggtggctcacaaccactggacttgatgcaggcatacatgcagacagaacaatcttacatataaaatacaaaaatatttggaaaaaaaagaaatgagtctttggtgcacatttaaataaactactttttaaagaaattgattggaggggtacaatttttataagaaaataattactggctctgtgggagaaagcacctttgtaatttatcatccttatgttcaaagaatatattttaaagccatagaaaaaaaggctaaaatttaaaaaaagaagaaagtcagtattttcaactgataaataaagtgctgaaacatacaaggtttgtttggctgaagtgaggtggcaccctcctgtaacccaaggaggcaaaggcagtgggagtcttgtgaggttcaggccaactagacctacacagtgaggccctaacagagaggggggagacagaaagagagctcaatacacaaaagacaaaaataccagttaaatggaagcaataaaaatgacaataatgagaactcctttaatactccatgctatccaaatacgaagtgagccgaatggagaacagtttctaaactcaatgtttgggtaaaagctgcccaaaatctgaggatcatctatgtacgccctgactcctgtgcagtcatggcctgtagtttagtcttcatcacagaaagtcagttattctagtcaaaagttcagaaactttactgacaaaaccttcttcctcccagacattaacctgacaagaagcttgcactcaaaaactatagaccccaggcccgaagttgggtttgaaaatacaaattcgggctggagacatggctcagtggttaagagcactgactgttgttccagaggtcctgagttcaaatcccagcaaccacatggtggctcacaaccatctctaatgggattcaatgtcctcttctggtgtgtctgaagacagtgacagtgtactcatataaatacaataaataaatctttaaaaaaaaatacaaattcaaatatttaaacttcagacattatttttacaataaccacttggcacatcaaaaactccaactataatacaaaactcatcagattatattaagccatatagaggcattttaaagattttaaatacagcatagctaacatcattttcatgcaagtataatgcaagagaaaaggtttacctgaggaagctccttcaaacgcagatgaaaattaagaattaagttgtaggagagaaaaaaagcacagggcttgaaaaaaatacttaaaagaaatgtttaaaactgcttactaagtcagtgccctcactgagttctgtattatcaattcttacataacgtgttagaaaacctagtttaaaaaaccccaacattttgtgtaatttagtacgtcaggtgaaagcatgacacgtgacacgtgacactcctgtgctgaagcatgcagacacttcagtaaagagttgggctcggagcagccatcttcagctctgaagcaggcccttagtggttttgcacaaatgatagcatactgtgtaagtttcatttttacaaaggcctaaaacttaatcttaggtcttaaaacttataattagatgattccaaaaacaaaggtgtcaaaaccacttactaccactaaattaccttaactttttcctacatctgaggaacagatggcaggcctgggtatctggacacggcacaaccacaacctatgacctttgcagtaataacaaacaaacatctttctaaggaccttctcatattttcaaactcacgcaatcatgaccacaatccggacacaatgcaggagaaagtgcttcacagttttccaatactgttctttcatcaaatgccctacaaaccagaccaccaaagctactgaagactgggtcttcagtccccaggcagcaacaagaaaacagtaacaaaagatttttgccaccactaatttttattagaacccaagatagcaaccttatgcctagatgaaaatttcaagcttaagtttcactttatttgggaaagaatcgtacttaataataagcaggtaatttgtttttctgtcttggttctgtctcttttggtctagactaagcttcaccttacaatgtggccaagagtaactgcacttctggtttccttggggacagctccagggtgctaaggtcacaggccacagagcacacctagtagtaactttgtttataaaataaaaaacgatgtttctatcactttgttttaaattgtttatacaaaaaatattaatataatttattgataaagaattaatggttagctgatatggttaaagattctcttttagatatgaatataaaaattgaacaaatttttatgtattatttgattcctaaaatactcagtattattatgtttgatatatataaaatgcatttaaataataaaaatctatgaaaaaaagattctcttttagtatctgacttaaaaataaaatctgacaaactgttaaatgcagatttttcaccaaaagctagtactagttatcagtgcacattgattaattgatagtacaacaaatacaagccaactatacaaatataaaccacattattcaaactgcaactgtaacatcatggcaagccaataattatggattcaaaggtacagcaacaaagctatgcccactttagtatgaaaattgttcaaattatttctattccatttcaatttcaaatcagcaaaatactccaaaataaatgaaattaatatatcaaaagtatttggagcctggaattctaatataaacctataaccatagcccttgagaagcaggaaaaatgggatgtttataatgagttcgagggcagcatggtctaggaaactggaaagttgtcccaaatatttaatatatattatatgtaacatataacattatatgtgtgtgtgctatctcacataagtaatataaacattaagtattaaatgtgcaatagatggcctagaagtaatttcagatgaaggcatttcaaagctctaatatttcaattgttttttttgttcttgttgattgtgatttgtgtaaaatctcaatcataaaaattgtccctatttgaaactttaagtccactatataaaaaaatagtaagagaaaaaaatggagaaatcttaatttataggtaaatatgtatttttgataatttcaattatgaagcactatataaattattcaaaaaagatacctctttgagttcaccaagaattagaaaacaacttgaagttttgaagaaatgaaaaaacaaatgagcaaacaacaaaatttttctcttagtaatctctttataaaaggaattttctttagtaagcaaatgagctcttaattcagacttaatcactgttaatctattcaatttagcaatggatagtatttagtagcaatggatactatttgcttttcttggtgaatatgaagctatcatgacaagtcatgtcggtttcaaaacatttatcagtatacatacctaaacactgccctcaacttcaagaaccaaaactctaaatcagtacttaagtttcctaagaaattaaaaattaaggccttggacattttattctgttgtaaagtgagcagcaaatgaaattgtaaaattaaacaggaaaaagaaaccaacatagcaactaatctattcctagaacacttataattatgcttgtgatccctaaaaataaaccaagaaattctctgtcctttttactgctttagtttctgtgcatctttggactaatgcaaactcgcatgcccaattcaggagcatcacggtaatttccagtaaccaggctaacaaccaatgtaaggctcagaaaagcaggtgaccagcacccgggaacttcagtcaggccaacccattctcttcatctggaaaaatttcatgatttttcttattctttgtcagaaacctgccccttcttcacatgagcacatttaacttcaccccatctgaagaaacaaaggtttagagtaaaaaaaaaaaaaaaaatctaagactaaagaagcagttaaacaacagtaacattaaagacactagcagcaaagtaactccctaaacaattacaaagaaaactgttcaaacactgagtgggggtgagcgcgaacctggcctttgagacagtctgacctggccctagaactcaaggtgtagtatgaggttgcccaagctgtcctcaaacataaaaataatcctcctgcttcagcttcaaggagcaaaacacctgactgcacatccaccttgcattccctgtcatactcttcagaacagcgacaaagacagcatttcagcagaggttcaaactcccacaaaatgctaaaagacatgagaccttgtcaaataaatctttttcttattagagatatctttagtggacaaagttgttagaagaaacataagccccgctgggcggtggtggcacacgcctttaatcccagcactcaggaggcagaggcaggcggatttctgagttcgaggccagcctggtctacaaagtgaggtccaggacagccaggtctttacagagaaaccatgtctagaaagaaagaaagaaagaaagaaagaaagaaagaaagaaagaaagaaagaaagaaagaaagaaagaaagaaagaaagaaagaaagaaaggaaggaaggaaggaaggaaggaaggaagaaaggaaggaaggaaggaaggaagaaaggaagaaagaaaagagagggggggggggagagagagagaaaggccccacaatagtcagaaaacctatgtgggcccagtttttaccacccagcaacagttgaccttggcaaaggtactatatctacatatcaaacacttcccctaacattaaacagatcccaggttctgcaaatgtctaagagcccagtagcctcaacccactaagtgcaagtaggccttctgtcacctcaggtatgaccatgttcaccaaaatgtttctagacattaccaaaagttcagatcaacaaaaagaaacacctacaagtcacagctttacccctcattagaaagatgggaactagggcaggaatctaattccagggcctggctaatgccaggctatgttctttgcattctagcaggctgcctttctaattcactgggccttgtctacaaaacaaatcaacatatttcttacattagggtatttaggacttatgtctattgatataatgcacctgtaaatactattaactcaatgagtatatagcatgggagctgagggaatggctcagtggataaagtactttactatgcacgcacaaagatctgaggtcagagccctagcaccaatgtcaaaaccatgtatggtggtacgcacccatgtatagtatgtacagctatgtgtggtgtgtacaaccatgtatggtgtgtacacctgtgatcccagcactggagggcacagacagaagacagtcttgccaaattggcaagctccaggttcaatgagagaccctgtctcaataaacaaggcacagagcaacagaggagacaccaatgttgattgctagcctataaactataaacacacacatacacagagaatatagtacattaaggtttgtttgataggagataatgtaatacagagtcctaaggacaactttaataatatctccccaaacttcattctcaacataaaagaaaaattttaattctatttagttgagagaaacataaaacattcaaaaaacaagtctcaggctagagagatggctcagtggttaagagcactgactgctcttccagaggtcctgagttcagttcccagaaaccatacggtggctcacaaccatctgtaatgggattggatgcccccttctggtgtgtctgtagacagctacaatgtactcatatacactaataaaccaaccttttttttttttaaagtctcattaaagagaaaaaatttattggaaaaaatctgcattttgtttcaaagcaaaaatttgcttctagcgttgttaaacaaatattgatttttacaattcacttttagaaatatatctccttaaaagataagctgtttcaaagcagaattcatacccttccatacaccttgagtaactgcatcctactcctagggtcaagaacaaacatacaaatgaggtctgcatcactaggaaggaagaaaaagggagggagggagggagggagggaggaaattattctacttcagcctgaaaacctacatgagtgttaccatgcaatgaaagtcactggtcctctagtgatataacacctatgtgcttatagtacaggtacacagacagaagagaaagatagaaactcgttcagacagtgagataggttcagatataaagatatgcaactcaattttataatctgctacaaaaaaaaaaaacagctaaaatactcagggaaagctcagcaaaaaataaataaaaattacaagagcgcagtcatgaataattacagcagcatccactctgcatttcaaaataaataagaaacagccctggaaattaaggcgctccattcccaggaaaccacaagcacaggaaggaaaaactagtccctgtcacgtgcaggtaggtgagccttaagcttactccgttcttccctcccctagataagaaaaaagcatgtgagcttctaggatggctcagctggctaaaaggcacttcctgctaccctaacaacctgactgccattcccagtgtcaaagagaggaatgagagaatcaactcccgaaagctgttctctaacctccaaacgtatgccctgttccattcctcccatccccaaccccaaataaatgagtaatttttaaaaatgcagtatgggaaggaaaaaaatctctctagctctttcttcccatttcaaagttgtagttatactgaaaatcctggctcactgtgaaactgagggcaaggtttaacagtaactttaaattcctatagtagctcactgcagactgtattgtctgctgtatgtatgtgagctggaagagcagaaaggaaatgctaatgtacctttcctgagagtttatataactgagttacatattcgaagtcctacttcttagtggtgaggaatactctttgtgaaaaagaactgtgatactgaccaagcatggccacaagttccagacaagccagggctacatggtgaggctctgcctcctaaggacaagcataccataactgtatcatagatcatatatgctatgtatcgtatcatataagcacacatattataaatgtcatgctatttatattcatctatattgaatactaagaaaatttaatcttacaacagatagttcttaaagttattatgtgaaaactaaggaagttttcatgttcccttaaaagttgaaaacatccagacagtggtgatacacgcctttaatcccagcactcgggaggcagaggcaggcggatttctgagttcgaggtcagcctggtctacagagtgagtcccaggacagccagagctacacagagaaaccctgtagggggattaactatgtgatttgattgttgcttgttcagacatggtctcgctatggagccttagccggcttggaactcacagtatagaactatagtggacctcaaattcactatgtagtactgaaggctactgcctaggaattagcaatagcctccttcctctgccttgctggtattagataaacttttgtggtgggtatcattatccttcctttatttcaggtaaagtaagactaagagaaattaaatagcatagttacccagctctgtgacagagccaagacagggaccctgtctacctaaaactaagataaataattataacttcagagtatagataagaccagccgtatttcaatgtaatttaaaagactcaattatggtttaaaatggcttccaaagtagtctgttctttaaggagaaaatccattttccagactagtaagtttgttaacttgatactcacatgcatgcctacacatagaaaaattcaaatatttacgttaaagtcactgttcgtattaagcgttggctttctgattataactgtttgactaattacacaaaacagcagatttgcaagcttttccacaccacgcacatacaggtcattagtgggtgcaactgcagtttgcatctctccaaagttaacaccacaaacaagtgttaagtcttagtactccaaagatgtccacaaatgtccgttgcaatagaagagtatacctgactattctaaatgtaattaaaacttcccaggcaaaattagttgtttactctgatagtaaccttcctccaagaaacaggctttttgttccagtataaattattttagaagctgaaactgctatatcgtcccttctgaaaccatagcagagaatacagaatgggaaggtaagacatcaaagccaggatcctaatttcatctctgccaatagcttcaggacctgagaaccatcatcccacaattagacacttttaagcaacagcagcaagacctataaaaaaaaaaatcagcaaatactaacataaagctatttaatctgtattcaacatcactaatagctcagcaactgcatgaacttcaaaactaccacatacaaatcaactacaaaaaaaccctgaatatttacagaaatcacttctgataaaaccacacaaagtgtcatacctaaatcatgatctttggaacaagtcctgtaacttttcaaaagagtggatcacaaaaccaactctccaacgctggttctgaaaatcaacttttttatctacagggagaagaaaggggaacaaaacgcgagccaccagctctgtgcagccaaacttctgttttatgagccagtagtttatcatggaaaaacaaaaaatgcgagcaagtaaactttttaagctgtactaataactaacactgcctcatagaacagaatacttctaaatggaataggcctacagaaatgaaaacctgacctacatactcaggactctaaacttatccctgtcaactctgaatttacataagttatcaatagaaaaacactgcctacatttggagcttactgagacataaagtattgaaaactgaatatttactaaagtgaatgttcaaactttctattttcctacatgaacaattttctaatcaagtcattaaagtgactattttagaagtggcttaaaatgctgtcacttgccgggcggtggtgacgcaagcttttaatcccagcactcgggaggcagaggcaggtggatttctgagttaaggccagcctggtctacagagtgagtaccaggacagccagggctacacagagaaaccctgtctcgggaaaaaaaaaaaaaaaatactgtcactctataaacaaatgaacagaaaaaaaaaaaaaaaaaaaaaaaaaaaaaccaacaactcatgttgtaacatttaaaaataagaactgaattcatttccaggaggtaagctatttcataatacttaggtatatattttatataattatgataaattagacataatgttccacacaaaaaaatgaaaatacactatctgcctttctcctgttactaaaataaagatttttaaaggccatgaatctccactttctaaatctatgtctagaaataaccagattatattcatcatatttaacttgaaacatttaatctttatttaatacgttataaggaatctcagtctacatctctattgctgtgtaaacttctaaaattgacagtaataaaatttcttttccttatattgaattacacataactgaaaattactccttttgatgcactttactcctcttaagttttaggaaaaatgaaatttgcaacttactatactagttgtatttttcaggaaagacacaaatgactatgaaaaaggcaagatgaagtttgtagagtcacttataaagaaaaaccataattacctgcaacaatcacttgcctttaacaaaagagctaatatcaataatcactattctctctgcaaggtactaatattcctgtggtcagtatctgaaaagtaaatataccaaacaaaaaagctgtaccagaaacctgaaccttctctgtgctttaacatcattaactcttgctgtctcacattcagcctactttccagacggtaagaaaaatttcctgggctggagagatggctcagcgggtaagagcacaccgactgctcttccagaggtcctgagttcaattcccagcaaccacatggtggctcacaaccatctgtaatggggtctgatgccctcttcttttgtatctgaagagagctacagcgtgcttgtataaataaaaataaataaatctttaaaaaaaaaaagacttcagagttttatatattaaaaaaaaaataataatttccaaccaacacattcctacagtaattcaattgtgccttcagcaaatgaaaatattcaacttactactttcataatgaaatttaacttggccaacctcattgccaacactgaccagcacaaatcttcaatgaccattttaatccctgccccaaacacagaaaaccctgatgaggaaccaagcaagccctctccctagcttctcagaactaaggggcgcacacctctcagaagagcaaggctcgctgactttttcccctcctgactcgttctcacatcaacatttggctccatcaaaccacagctctagaaattaagagtttgttattagtcatttgatgcagtatttgatgctgctttctacgcataccataactaaagggagagctttggatttcttcagccacataaactgcacgtgcagaagcccatgcagtatgaaatcaaataaggaactgcaatcacgtcactgctcagacaaaaaaaaaaaatttacaaaataatcttgaagtcctttggggaaaggaaggcaaagcagaagtgtactttggactctacaagaagtctgcctaccaggcattctagacttttctttgaatgtttttttttttttaattaaatagatacctgactaattccttctagatcgagattattaacattaattcacaccaacagtaaactgccttgaagcaagtgacaactcagaatgctcaccaattatcttttggtcaagttcatcctgagtaaagcttctcaattaacgcaaactcggaaattaaagattcctttcaaactgtatttttagctcgaaagaaaattagcctgtgtgaagccagctcttcagtgagagtttcatcttcatgtcagaacaaaaaactcaatcaaaattagctatgcattttatatgccactaatgtaatccatcaaacctcttccaaatgaaaatatttcttcaaaaaaaataataaattaattaataaacaaagttctccatagtgatctattagcaggacatgtatagacaagttgctgctgcccttccaccttaagaaaatgtctactaatattaactaaaaaataatttttacaaagaataccttaccaccaattataaaattacataattttaactaaatactgttcaatgctacaagtcacataacaaaattttgggttgtaccaaaaggcccaatcatttaaaggctcagtcacttcagacctgcaacttgtgttttcgcacaccttgcacactggcctccccaaagctctcaatttctgtcaacacttcccactctgcaaaagaggagggctctctttcctacccctgatcataaccagcaccatacctgaaactgcaaagataaatgctttaaaccacgaacttttgaagtacaaaggcctaacttttagacaatcagaactatacaacgttaaaattcttgggtttctgtcttattcaacaagctgactcagtaaattactgcatgcagagagctagcatacctacaatctggagccagtgatccattcctgccagtttgtctggatattagcgggctaaattatacttgacgttctgcacaaatcaggctaaaacccactgataagccaacgagtcagagcacctgaaacaaaaaatatgagcagcgaattcacgctactacttaaatttcatgtgagaactgagtttaacctctgcagtcatttgccacacacagcaagcatccctggactcacagacatcatcatctgggatcaaaaactattcgatctccattctatcaagtgtggcgaggtcaaatgaatggaacataccactgaaatgcaaatttcatatcctatcccacatctcatcaggaaagaaagtctaatttaacaaagttctattaaaagctccaatgatatatattctggcactattgattttaaactacaaaacttccaaatgcaggctccaaatttgtaattacgtcggtttaaacacacaaaactacttctaccctcaaatgtgcaccgtccatgctgacgatgactatgcttataaagttatgcaaatcagtccacaagtcacatttcagaaaaatcttccaatgcaacccaggaaactaaaaacaatcactgcaagattctgaggcaacatgcctacgtgcagcacggactttcattttaatctcatctacaccctagatctagggcccaagtcacgatctaatcgaaatatgcacaacccaaagcgtctatttttttttttttttttagttcatttagaaggctggattgacgagctcgctaatccagtgtacagtactctgtattaccggacaatagattttaagaagagaccacagagctcgacaagaaaacaatccgtgccttgacacttgcaaggaggcatgagttccgtctagccgaacactccctaggttgaatacactggaagagacacaatatgcacgatctagaaatgcgcccagaattaaacgttatagtcaccccaactacagaaatttttcgcatccgtctactcccacgttatcagagtgacagaaaagcaaagaggaacagccgcagaaatggatacaggtcaagtctaagtcgaatccatcctcttgatatctccttttgtttctgctaacgatctctttgatgatggctgtcatgtctgggagcctgtggctgaagaaaaaggaggagagagatggcagaagctgctggtggcgaggcttcttctgcaggatggaaatggctctggacttggcggtcgctgatgcccctcgctctgctgccgcttggccctggaccgcagccgggtaatggctgctgcggcggctgctggatggttgcagagactgggcctgcttctcctcagcagccagaggcctggcagccgaggcagcggaatggggagaagacggataatcctcgcagcggctgcctcctccggcggcctccggagcccgggccagggggggtgcggcggcggcggacgggaggcttaacaccggcccgggtccctggacgtgccgccgccgccgccgccgtgttggaggcaggagaaggggagagagcaactctccggcgttcccagccctggcaatggtgacaggcgactccgaccccctccccggagccgcggccgccgccgccgcttctcccccccgctccaggagcgggaggtgcagccgccgagcctgcgccggctcccgctcgagcccacggcttcttccaccgtctctctccgaagctgctcagaagctgcccggttagaacagacgacgaggaggcgaggcccgccgccgctgccgccgccgccgcccggccggctccccgagggcgctgcccccgcggctgctcacaggcgctgagaggggctctgggccgtggccgccgccgtctctcatctccctcgcctgcgccgggcctggcctcacagcggctcaactctcaaacttccatcatggctgcagcttccgagaggagagagctgagcgcagccgcgtcccgacgcccaagcgcgtatcctgccgcagtgcacaaagagtcccgccacatcaccgtgcgccggccagcccgccccctccgccgccccgccgggagagcagggcgcctcggaaagccggaggggaggcgggaggcgggcgggaggcgggcgctgagccggggacggggcggggcggggcggggcgtcggaagggacaggggcggggaacgccgcggagcatgcccagtgtgtccgcggctcgctcccggagctacgccggctttggcctcagcgcagagagacccggcaaaggtacaacaggctggggccgagtgagggtgcgctgagcacaatcgctgaccgctcacaggtggatcgcactagctgaccgccttggtcggtgctccgggagcctcaggggcaggattatccttcctgcgtctgtccctgcgtttcttcggaacggctttcattccctgccctgcgctgtggtcagattgcagtgcttcgctaggatttgtcggcgacagtctttacctagataacacacctctccccctcacggtgtcctcaaggtgtcagtctttgcacaaagaacaacccctattgtgtctcccgcgtgggtcacctcatcgggctccggttccctgccccgcctcttgcttcccaggcagctgggttcatttgcccgaaagatgaacgctcccagccaagcatgatgattgtgcatacggggcgtgtacattcacatctcccctgagtttccagggcccaaaggacacccctggttggacaaagtgggtctccgtgaatagagtgcacctcacacacacccctccaccgcccggtgatgagacccgcagctccccgcagcggtgggtctaccggatcacagccaagctcagtcttcaaagagctaagcccccacccccaatccccacttcgtggccgctatgaaaacccggcagaattggatcgcgatggccaggttctgaccctgtcggaccttgcatgttcgaggacccggttactgagcccgggtgtggagtatgggacgttcggaagctgcagccagcgagtgggcggggcgagcaggcctgggagggctcaaaggcgaggtggaaggatacatgagccgcggtcggaactactttcaggaggaggtcacgtgtggtcctagttggggaactttccaaattcccattcccctatctgtgtgctcctggggcaggagcttggtcccctctgctctattaggtgatcgcccccgcctccttctcccgtgtggtctgctggacccctctcttgccggatcggagcagagaatagcatccacgagccgtccgcaggagcgctgtcggggccgagcgcctggggagctggttacacaagcagccacatccaagcacgtgcccccgccacccctctctgctggccgccgccggtttgtgcacgctgacgcggagagtccccaagctgttcctccctttcgcttgtaacccatagagctagccagaaggccgggacacgagactcctgttctggatctgcccacaccgcgcgttcccaaccgtgggagaagaggccgggccctagggggaggcgcggggcgggggtgggggggattgacgcatctccttcgcttaatgaggtgaaccctttctagatctgtactcgcggggcaaaagggtatctcctgttgctgctggctggttaggcttaccgatgttgcaacaaacttccagtcactgcccctgaactggtgagcgcgccccacctaccgtagactcagccaagtgacttatctgagcacctagtcaatggctgtcagcccagaacaaacctgtcaagtaaaagcttactgccgggattggctgacctgtcgcggttgagagagctggttcagaaatgctgataactagcgtacagcccctcctcccccaccaaccagccacaaagcaagcgatcaccttgagcttggagggaaaaaaaaaatgacatcaactccaatgtaggtagagttttcttccttattgttcttttcccaggggacttaattctcaggatgccaatctgagccctaaagtatctctgagttgagacctaagctgaaacactggatcattttagaaatccggaggatagtagtcagttatggatttgcaataattgcgagtaggtgtctaggaaaggctagctgggggtttagagtacaggagaaggaaaatttcataggtccacacagcatagttgcaggcagcctctgaagtctagaaacctcaagaggctcggctcagagagctatgggccattaccgaactgcaggactgctaattaaaccggggatatttacagttctattagagctctctgaagctactcaaacattgcatttagatacatcctttaaagatctctccgccagagatagcagcccaagctaagccagcgttgatgtttattacaggctgttttggggcaaggttctggtcagtagagggagggcagggatgaccaatgagagcaatctgagaacaatagccgagaggcctctatttggtttctaacgatgtaaataaattcggttcacacagcctaatctaagatggagatctagtttacacagaatccccaatgtcaaagtgttagctgagatgcacagcaaaaacctaagtggtgctcagcagagtgtctactactgctgtggggaaaaataaggatgaagttacatcaagagaagtgggttgaaaaggggaaatggcccacattcgttcctgtccccagagtccctgttactagcatcaccctcttttgcctcttccctggaggcatcttgcgtgacattactcggagcgtctaagaagctcggaaatcttcctctaaagaaaaagaaagacattcatccctaagcttcctgatgcctggctggaggaaaaaaaaggacccgtttctgtttccagagcatcactccatagagcacaaggaggcgcatcccagcgctgaccccagcccacaagcaccaccaagtgaggcaagaaagccgaaagccagctagctgcttcgctcggctgctctgcagggctgaaggaacagacacgcggtgttggcaggtgtgtgggcccctctgacatcagctggccacgctgacagcatcaggccttgttgggagtttctaaatacacccctacttcctttcgcagcaaatatgtttctgtgcagccttttaaaattttttggagtttttcacatctttattccactcaaaggatgtgagtagggcaaaagggaaaaagtccatatagcaattttatatatatatatatatatatatatatatatatatatatatatatatgaaaatgtatatatttatatgcttggctgtacagatattacaatacactggtttccaagtgcttcatttcctcacctgtctggatttaaaacactcaagggagaaacagaagcttataacgaagggagaattatgtaaagctctagggagactgactatatagaataattagggagtatgataaaccagctttaatgatagtttccaacagctgattccagaactctattgttactacatgctaaagatgtccaaagaaaattctttcccttgataagtgggacaccaagaaggggatgtaggtaatataaatagttgatgtgttgttgtaggctctgtgcaaaagcatctcgtgtgtgagcacgctgctgctgtagtgcctttctccttccccacatctctgacccctcaacaagagagctcagtctagcgctttaatttttaagcaagcttctctatttttatcaaaaaaaagcattttctagatatataatggattagctagcacatttggctttgaatttaaactgccctgttcttctacagctctgaaagctttcttcttatttattctgtgatttctccttctactttttatttttaatttacatctatctgttgtttatgcaagcgcatgagggcgcatgtgcacaggtcctggcacatttgtgcacagcagggggcaacttgcaagagtctgtcctctgctttcaccccgtagcttctggggatccaatacaggttgtcaggtttgatggcacacacctttacccatggagccatcttaccaccccactattgctctttcaaacaccacttgctcatgctttctccagaaggcacctctgtgagtcctgcaattcctgtattccaagagaaaatttcaaatgcctgtctaggggctggtgagatggctcagcagttaagagcactgattgctctaccgaaggtcctgagttcaaatcccagcaaccacatggtggctcacaaccatctgtaactagatctaacgccctcttctggagctgtctgaagatagctacagtgtacttacatataataaatataaataaatcttttttaaaaaaaaaaaagcctgtctataagcttctcatagcctaaacctctcccaaagcttttgcaaatgtcactctgtcacctttcctgtctcaagagctattctgtatgaaatcatcagcctcagacaagtcgagagtgaacggggtgtcctggagcggaccagacctctgctgtctgtggtacgcagaaattgtcacccggggaaacacacgaagcaattttagttctgttcactttgactgctggatcttctacttcagtcttaactccagttctagcccaaaagaacatagtttgctgttttaatacttctaataaaagaaaaataatgtgtgtctaggtttaggagtgtcattgatatgaaatcaagacggacagtacttctagattatcaactactttggaggaaggagtacctttttggaaaagaaaacagaccaaatctgcttaaattaacctcctgctgatggggtccttattgccattcttataatgattcattcattcattcaacaaacgcttgtgactgttaggcgctccttccattaagccttatgcatagagcaatgactggccaactgggtccacattcataatgatgagtcagctttggaaacttgaatccttgggctgtcgcaacctcttcacagcacaccaagacaagttagccgtgctggtgctttgataactaactcaattacctattgcttcacaacaaatcacagtaaaacccagtgacttgaagcgaccatcattgttttcccacagttctcagggaagggtatggcggagcaattcttttccccacttaacttgtcccaggctgaccttgaacccagagatctccttgcctcagtctcctggagttaaaggcatttgctacctggcctggaactaagcttttttttttttttttagatttatttattttaggtatatgagtacaccattgctctcttcagaccagaagagggcatcagattccattacagagggttgtgagccaccatgtggttgctgggaattgaactcaggacctctggaagaactgggtctaagcttttaatgaccactatacctcaagatctccatgtcaagatatgggtcagaaacttgtgtctcccagcctcaagatctggatcataggtgtgctctccaattttcttattttatttatttatttatatttttttttttggtttttggtttggtttggtttggtttggtttggtttggtttggtttggtttggtttttcgggacagggtttctctgtgtagccctggctgtcctggaactcactctgtagaccaggctggcctcgaacccaaaatccacctgcctctgcctcccgagtgctgggattaaaggcgtgggccaccactgcctggcatgccctccaattcttgattgtagttcattccagatatagttgagttgaaaaccaggaatagctaccgcaaaataaataatatatatgtgtgtgtatatatgtgtgtgtgtatatgtacacatatatacgtatatatacgtataactacacacatatatgtatatacatatatgtatacatatatgcatatatatcctaatagaattatgtttattataaaaagaatattaattaaccagggaggaagattgactctaatttcatttttttaaagatttatttattattatatctaagtaccttgtagctgtcttcagacacacaccagaagagggtgtcagatctctttacgaatggttgtgagccaccatgtatatgacgagtacacggtagctatactgatggttgtgaaccatcatgtggttgctgggatttaaactcaggacctttggaagagcagtcagtgctcttaactgctgagctatctctccagcccctctaatttcattttaaataaatgagatcactaagaaatctctagcacttgagaaaggtctgtgcagtaactaccataaatgatatttgggaaagatgctgtgtgctacagggatgctgtgtgctacagggatgtgtgctacagggatgcttgtgtgctacagggatgctgtgtgctacagggatgctgtgtgctacagggatgctgtgtgctacagggatgtgcgctacagggatgcttgtgtgctacagggatgctgtgtgctacagggatgctgtgtgctacagggatgtgtgctacagggatgctgtatgctacagggatgctgtacaagctctgtcttactccaaatatcatctcttctctatcaactgcttcaactaggtttttcactctttgtattacttaacaatgttctgttcaaaaatttttctttccctctagaaataattgtatttttacagcaccacagactctttccatcctacatggtgacagacagctctgtgatataaagatggaagatgaaaaagaaattgcaaggatcccctcatccatcaactgcattgtacaagcaaagaaactaggaccagtggtataacgtgcccctattacacaagagtcaatgacagatccttacgagtgagtgtgggacgtttccaaataccaatttttgtttggttggggtttttttggttgttgttttgtttttgtttttgtttttgtttttgtttttcgagacagggtttctctgtatagccctggctgtcctggaactcactctgtagaccaggctggcctcgaactcagaaatccacctgcctctgcctccagagtgctgggattaaaggagtgcgccaccaccagccagctccaaataccaatttaattaaaaggggggggggggggcgcaaaaccccagcttttaaataaacctgagcaggttaacatggggaaatttaattagcgatggcttttcatggcattccagtcctagaggacacagaacatggggtgagatgtgacgtgtgttatctaacaagttaagcctgaagttacttttaaggatgaggcccttaagaatcaaacatgcgccgggcagtggtggcgcacgcctttaatcccagcactcgggaggcagaggcaggcggatttctgagttcgaggccagcctggtctacaaagtgagttccaggacagccagggctatacagagaaaccctgtctcaaaaaacaaaaaaaaaacaaaaaaaacaaaaaaaaacaaaacaaaaaaaaaaaaaagaatcaaacatgctagagcagggcagtggtggcgcacgcctttaaccccagcactcgggaggcagaggcaggcaggcggatttcagagttcgagaccagcctggtctacagagtgagtttcaggacagccagagatatacagagaaacccccgtctcgaaaaaccaaaaaaaaaaaaaaaagaaaaagaaaaagaaaaaagaaaaaggagtcaaacctgcaaatgtgaattgcccacagtccctacgatccttgggaaaagtattttttccaatgtatgaagacggctcatgcattcagtgggggctgaagagaagaaaaggaagggacttgcaaaggaagtcttaggaagaaaacgccaaacttcaccaaagaacaaagggaacgctgccacctgctgaggagtcagtaagctgctgccagcgatgctccaaagaactcaacagtctcaggcagcccagtttgagctcagcttacagcaggcctgccttgctggggtaggatggtagcggcctgtttcccctacccccctttttcatgaatatttatgtctgttatctttttagtcccaccccccaaacccaaatctcacaatacaatactaaggcttttatttaagtattacatgcatgtgggtaaaagtttccagtggctcgccattcctcttccccagaaacagatcttttgggttttttgtatttttttttttccattttgattctttacaattcttctcttctattgtgtacaaacatcagtacatagtggcacctttaatctccctctcagtggggcagaggcaagtgcatctttgagtcccaggccagctaggtctacctgagtgagttctagaacagagccaggcctgcataatgaggctttgtctcaaaaacaagcaacaaaaatgagtacacacatgaagaaaatttgcaagagaaggctagaagaaattgctgttagacctttcattggtctactttttcttctatacctccactttcctatgtgatgtcctgccccccacccgaccccctttctttctcacctactcatgcctacatttttctctttatcatatgctgttgtttggtgccctttgattttcctgtcatcaagagaatattgtttgtttgtttgtttgttttttgtgtttgtttttgtttttgttttttgagacaggatttctctgtgtagccctggctgccctggaacttactatgtagactcagagatacacctgcctctgcctcccaaatgctggtatctttaattttacttaacttgaccttggaacctagtcatagaccactattgtgttccatggttacactaaataacacctgaaaagagctgtagcccttttccagttcgggtggttctttttgtcttgtcgtttgtttgtttgtttgtttgtttgtttgttcatttgttttttgagacagggtttctctgtgtagtcctggctgtcctggaactcactttgtagaccaggctggcctcgaactcagaaatctgcctgcctctgctcccgagtgctgggattaaaggcgtgcgccaccacgcccggctgtcctgtcttttattaaaacaatgtgtcagaatccataaagtaagtttgtacctttacagaagtcccatagtaactgaggttttttgtgactgctaacaatctcagaaagaacactatagaaaggcctaatgttgtcaaattcaacttggaaattctgccttttctaaatacagtaaaaagacagttctctgttgagggtcttcgccacctaattgtattaacagaattaacaacttttttttgtattaacattaatggagggctggagagatggctcagttgttaagagtgctcttccagaagtcctgagttcaattcccagcaaccacatagtggctcacaaccatttgtaatgagatctgatgtgctcttctggtgtgtctgaagacagctacagtgtacttacatattaataaataaataaatcttaaaaaaaaaaacattacaggacagccagggctatacagagagaccctgtctccaaaacaaaaacaaaaacaaacaaacaaacaaaaattaatgtattcttgaggtcttgttgattgtaagatacaagattgtctgcatttcaagtcctgtgcattttacaatattgagtattaactggtcaacttagctattaactgagcatcttttcctataatttaatttgacagattaaaatttctaaatctattcattttccttctgagacagggtcttgctgtgttgcccaggctgaccttggtttcatggtcctctttcatttgtactgggattacaggtatgggtcagcacattccagctaaactttctgtctcgatcaaactctcttgtcttataaaaggcattatatgggaggcagaggcaggcagatttctgaattcaagtacagagtgagttccaggacagccagggctacacagagaaaccctgtctcaaaaaacaaaaaacaaaacaaaaacaaaaggcattatactaattttgaaaaaattgatatacatttattttatgttactttagaaatgtactgttcttttcaactatatccacaaatttgcaaaccaaaaaaaaaaaaaaaaacattttttgctacaatatcgatctcctttgacagcatccttggcttgatataaattaagccaagaaatcttgaccctagttctccaagactgcagaatactccagacatctgtttgctttgcagattacaaagaacagagaagaaccttaaagcatttgagctttggagcacagcataagtgaactatcgggccatctttcctccttaatatagaagacacatttaaaggaacaaatagctgggcagtggtggcacatgcctttaatcccagcacttgggaggcaaaggcagacagatttctcagttcgaggccaacctggtctatagagtgagttccaggacaaccagggctacacagagaaaccctgtctcaaaacaaaacaaaacaaaacaaaaagagtgcatgacttgacttagggtccctgaaggcactcagggtagctcaagctgcctacaactccagctccaacaaaaacagagcctcttgggcccccacaggcacataattaaaaatgattttaaaaatgtttttaaaaattaaaaaataaaatatgcattagtacacatagcagaacatagctctgtgtggtgactcatacctgtaatcctagctcttgggaaatgaaggcagaaaaatcagaagttcaaagtcatctgtggctatgtagtgagttctaggctggcctgggatacatgaaattctatcaaaaaaagaaagagagacagagagagagagaggaagaagaggaaaggggagaagaaggaggaggaggaagagagaaggaggaggaggaggagagaagaaggaggaggaggagagaagaaggaggaggaggaggaggaagagagaagaaagaggaggagaagagaagaaggaggagaagagaagaagaagaggaagaggaagaggaagaagaggaagaagaggaagaagaagaagaagaagttgttgttgttgttgagtggttaagaatatatgctactcttcctgggtctttagcacctacatgataactcacaactatcttcaactctgattctagggatccaacaccttattctggctaccttgggcattgggcatacatatggtatatagacatgcatgcaggcaaaatatctatacacataaaaataaaatatatatgtgtgtgtatgtatgtgtgtgtgtgtgtgatatatataaaatagcaaaacgtgatgttctcctgtgatagaagattataaaccaggataaaaaagagtcagttatatccatttgtcaccatggaaatatctcaagttttagtaacttatggttaaatctggctcgcagaatcacagaataaaaacgagcttattcttctcacttttcccatccttctcacaactagggaaagtgcaggaagactatgggctctgtggtgtcacctaaaccttggtcctgaagcaagcagcgctgagcggatgtcgtctaacaccatcataccgtagtcacggtcttctgacacagtttagatattatacctgctgggaggtgggggaggggaacagagccaaggcataggctaggaagcagaggactttctcatcatctgtttggaatcttgactgtgtggaaagaaggaaataggttcttcttttcttaggtagtgtcctgatttgctttctttttttttttttcttttttcttttttttttttttttggtttttcgagacagggtttctctgtatagccctggctgtcctggaactcactttgtagaccaggctggcctcgaactcagaaatctgcctgcctctgcctcccaagtgctgggattaaagg

SEQ ID NO: 809 - DNA, 42 bp, Homo sapiens
gacagccatcatcaaagagatcgttagcagaaacaaaaggag

SEQ ID NO: 810 - DNA, 45 bp, Homo sapiens
tttagaagcagaatcattttcagtatatatggtgcacattgaggg

SEQ ID NO: 811 - DNA, 44 bp, Homo sapiens
aactgtatgtagaagttttgtagtttgaagtcaatagtgccata

SEQ ID NO: 812 - DNA, 48 bp, Homo sapiens
ttttttcatacagtgtattaaatttactgagtcagcttgctgaataag

SEQ ID NO: 813 - DNA, 58 bp, Homo sapiens
gtttcaggtacaacacattggttttgattagggatggggatggggccctctttttgca

SEQ ID NO: 814 - DNA, 46 bp, Homo sapiens
taataaaagttatttcttagcaaatgtcagttgcattttgtctaaa

SEQ ID NO: 815 - DNA, 25 bp, Homo sapiens
tatttttttttaagacagcgtttat

SEQ ID NO: 816 - DNA, 46 bp, Homo sapiens
aaatgtgcacagttaattttgcccaagtttttgttttgaaatgaat

SEQ ID NO: 817 - DNA, 40 bp, Homo sapiens
agcagtctactattagcatgaattactgacagtcatccaa

SEQ ID NO: 818 - DNA, 44 bp, Homo sapiens
taatttctagagttgtggttttattgagccaaaagttgatatga

SEQ ID NO: 819 - DNA, 51 bp, Homo sapiens
ggtttgcttgttttcacgttaatgttttctgtttattggagtgggaaggca

SEQ ID NO: 820 - DNA, 36 bp, Homo sapiens
agtatttttatctgataaagaaagattaataatgaa

SEQ ID NO: 821 - DNA, 44 bp, Homo sapiens
tttcaaataaatgttcacagggaatacttttaacttgtagagag

SEQ ID NO: 822 - DNA, 49 bp, Homo sapiens
ccgttgggttaaacaaacagttcagaagttttattacatggaacccatt

SEQ ID NO: 823 - DNA, 38 bp, Homo sapiens
tgttttgtaaactagctgtatttttggtccatgtctag

SEQ ID NO: 824 - DNA, 63 bp, Homo sapiens
aaagtaatcctttttcctttaattatgtagttgttgaactgttgggagttacttttctcttac

SEQ ID NO: 825 - DNA, 47 bp, Homo sapiens
tattacattaaagccaaatataaaatgatgcaatctagcacacactt

SEQ ID NO: 826 - DNA, 45 bp, Homo sapiens
ctgaaggaaaagatttatacattcagcttgtaattagtaatcaag

SEQ ID NO: 827 - DNA, 29 bp, Homo sapiens
taacagaattgtattcctaaaccgattaa

SEQ ID NO: 828 - DNA, 47 bp, Homo sapiens
aatatggcagcgaattcattatcatcagattgtggtgtctgtatgtt

SEQ ID NO: 829 - DNA, 47 bp, Homo sapiens
aagccattaaactgagtcacttcagggttagactatcagaactgggg

SEQ ID NO: 830 - DNA, 53 bp, Homo sapiens
ttttacttattctttcattactctcatactgtaattaaaacttgcaatctgag

SEQ ID NO: 831 - DNA, 43 bp, Homo sapiens
atttaacagattttcctggaggtttttgtgtaccactgggaaa

SEQ ID NO: 832 - DNA, 46 bp, Homo sapiens
tatttattacatcggggcaaatttttaaaggcacaagaggccctag

SEQ ID NO: 833 - DNA, 49 bp, Homo sapiens
tttgtacatttttccatctctaagaaggacaaagcctaagcccctccag

SEQ ID NO: 834 - DNA, 53 bp, Homo sapiens
ttttacaaaagaaagaagagtaaatggaatctgtagattctattgcctgatga

SEQ ID NO: 835 - DNA, 46 bp, Homo sapiens
gaccatgacatggagagcttctgtctttaccagtgccccaatatca

SEQ ID NO: 836 - DNA, 45 bp, Homo sapiens
agcatttgtgtttaggttgaaacagcattagaaaactagatacgg

SEQ ID NO: 837 - DNA, 41 bp, Homo sapiens
tggatttgcatttttgtaattgtgaatcaccattataggag

SEQ ID NO: 838 - DNA, 43 bp, Homo sapiens
gacaactgatagttattataaagaaaaatgttctgagagtgag

SEQ ID NO: 839 - DNA, 38 bp, Homo sapiens
tttcaatattagataactcacatgtttaaactatgaag

SEQ ID NO: 840 - DNA, 45 bp, Homo sapiens
tcttaaatcaggttattttttctagcctgtttactaaatttctac

SEQ ID NO: 841 - DNA, 47 bp, Homo sapiens
atgaggactttttcagttttaaataagaaaaacccaactcaaagtag

SEQ ID NO: 842 - DNA, 43 bp, Homo sapiens
cacacagggataataatagttttccaaagaaaaatcaaggagg

SEQ ID NO: 843 - DNA, 52 bp, Homo sapiens
gtaataataatcatatttcttcctttgttgaattgctttcctgtagtaatct

SEQ ID NO: 844 - DNA, 100 bp, Homo sapiens
atattaaagtagtattctgttctggtagtagtatggcagtattttaggtctgaaagatgtacataatctgtactttgaagtctgttttttaagagattaa

SEQ ID NO: 845 - DNA, 54 bp, Homo sapiens
attagagatacatcaggcaaatttcaatttcaaaagcagatgacagaatctcag

SEQ ID NO: 846 - DNA, 47 bp, Homo sapiens
tgaacgaatgtgctaaacatcaaaatgtattaagtaaaagctgaaag

SEQ ID NO: 847 - DNA, 46 bp, Homo sapiens
accatatctagaagtttacataaaaatttagaaagaaatttaccac

SEQ ID NO: 848 - DNA, 51 bp, Homo sapiens
agaggagttcagcaatttgctgctcttagggcagggatcaattccttaata

SEQ ID NO: 849 - DNA, 99 bp, Homo sapiens
gactaggtattgacagtaatggtgacaaagcaatgaaaaggaaaggaagaagtgataagacgtggcagcaagctgaagtatgatgagtaaagaatagga

SEQ ID NO: 850 - DNA, 27 bp, Homo sapiens
accatgttttaaggacagttgtatgca

SEQ ID NO: 851 - DNA, 47 bp, Homo sapiens
atatctgtcttaaaagttacttttgatgtagttcacaaatgtaccag

SEQ ID NO: 852 - DNA, 48 bp, Homo sapiens
tagaaaatggaagtctatgtgatcaagaaatcgatagcatttgcagta

SEQ ID NO: 853 - DNA, 50 bp, Homo sapiens
attccctgtgttcatgctttcaaaatacagatgagtgaggaaagtaggga

SEQ ID NO: 854 - DNA, 46 bp, Homo sapiens
ccagttttataaaaagtggagacagactgatgtgtatacgtaggaa

SEQ ID NO: 855 - DNA, 41 bp, Homo sapiens
atactggttcacatcctacccctttgcacttgtggcaacag

SEQ ID NO: 856 - DNA, 46 bp, Homo sapiens
agcatgctacagttattaatctggacattcgaggaattggccgctg

SEQ ID NO: 857 - DNA, 35 bp, Homo sapiens
tgagattctacagtaagcgttttttttctttgaag

SEQ ID NO: 858 - DNA, 69 bp, Homo sapiens
tgctattgaaagaatagggtttttttttttttttttttttttttttttaaatgtgcagtgttgaatcat

SEQ ID NO: 859 - DNA, 42 bp, Homo sapiens
agggttttgattttgaatgtttcaatgtttttgagaagcctt

SEQ ID NO: 860 - DNA, 42 bp, Homo sapiens
ggttttgattttgaatgtttcaatgtttttgagaagccttgc

SEQ ID NO: 861 - DNA, 46 bp, Homo sapiens
agtgcctcgtttacctttaaatactgttaatgtgtcatgcatgcag

SEQ ID NO: 862 - DNA, 44 bp, Homo sapiens
gtgcctcgtttacctttaaatactgttaatgtgtcatgcatgca

SEQ ID NO: 863 - DNA, 44 bp, Homo sapiens
gcctcgtttacctttaaatactgttaatgtgtcatgcatgcaga

SEQ ID NO: 864 - DNA, 48 bp, Homo sapiens
ccatcacaacaacaataaaataatcactcataatcctatcacctggag

SEQ ID NO: 865 - DNA, 115 bp, Homo sapiens
aaaacggacagtgatttgattactttctaatgccacagatgcagattacatgtagttattgagaatcctttcgaattcagtggcttaatcatgaatgtctaaatattgttgacat

SEQ ID NO: 866 - DNA, 4042 bp, Homo sapiens
gccccgggcgatccatcctgccgggttttcacggcggccaagggggggcggggctaggtggtctctgagaaccgagcttgactccgacgccgcgaaccgacctggagcccgaggggaaagatgctcgactctcttgggggcaccggagcgggcgcaggagaggcctgcggggtgcgtcccactcacagggatcctctttcagttcatttagataggtgccctttgggcccttgaaattcaacggctatgtgttcacgttcagcacgctcggctgagagctttcatttttagggcaaacgagccgagttaccggggaagcgagaggtggggcgctgcaagggagccggatgaggtgatacacgctggcgacacaatagcaggttgctctttgtgctaagactgacaccatgaggacacagatttgggggaagggggaatctctaggcaaaggctgttacagtcaaatctctgcgaacgattgtgatccgacagcggtgcaaaaggaaagagcgaatgcagtccacgccgcggaaatctaggggtagaggcaaggggggagggtattccccttgcagggaccgtccctgcatttccctctacactgagcagcgtggtcacctggtccttttcacctgtgcacaggtaacctcagactcgagtcagtgacactgctcaacgcacccatctcagctttcatcatcagtcctccacccccgccccacaacagcctaccctgcctccggctgggtttctgggcagaggccgaggcttagctcgttatcctcgcctcgcgttgctgcaaaagccgcagcaagtgcagctgcaggctggcggctgggaaccggcccgagcaagccccaggcagctacactgggcatgctcagtagagcctgcggcttggggactctgcgctcgcacccagagctaccgctctgccccctcctaccgccccctgccctgccctgccctcccctcgcccggcgcggtcccgtccgcctctcgctcgcctcccgcctcccctcggtcttccgaggcgcccgggctcccggcgcggcggcggagggggcgggcaggccggcgggcggtgatgtggcgggactctttatgcgctgcggcaggatacgcgctcggcgctgggacgcgactgcgctcagttctctcctctcggaagctgcagccatgatggaagtttgagagttgagccgctgtgaggcgaggccgggctcaggcgagggagatgagagacggcggcggccgcggcccggagcccctctcagcgcctgtgagcagccgcgggggcagcgccctcggggagccggccggcctgcggcggcggcagcggcggcgtttctcgcctcctcttcgtcttttctaaccgtgcagcctcttcctcggcttctcctgaaagggaaggtggaagccgtgggctcgggcgggagccggctgaggcgcggcggcggcggcggcacctcccgctcctggagcgggggggagaagcggcggcggcggcggccgcggcggctgcagctccagggagggggtctgagtcgcctgtcaccatttccagggctgggaacgccggagagttggtctctccccttctactgcctccaacacggcggcggcggcggctggcacatccagggacccgggccggttttaaacctcccgtgcgccgccgccgcaccccccgtggcccgggctccggaggccgccggcggaggcagccgttcggaggattattcgtcttctccccattccgctgccgccgctgccaggcctctggctgctgaggagaagcaggcccagtcgctgcaaccatccagcagccgccgcagcagccattacccggctgcggtccagagccaagcggcggcagagcgaggggcatcagctaccgccaagtccagagccatttccatcctgcagaagaagccccgccaccagcagcttctgccatctctctcctcctttttcttcagccacaggctcccagacatgacagccatcatcaaagagatcgttagcagaaacaaaaggagatatcaagaggatggattcgacttagacttgacctgtatccatttctgcggctgctcctctttacctttctgtcactctcttagaacgtgggagtagacggatgcgaaaatgtccgtagtttgggtgactataacatttaaccctggtcaggttgctaggtcatatattttgtgtttcctttctgtgtattcaacctagggtgtgtttggctagacggaactcttgcctggttgcaagtgtcaagccaccgattgctttcttaggctatctatatggtctcttcctgagggctattgtccgttaatacagaatacagtacactgttagtggattagcgagctcggtaatccggtctcctaaatgaacaaaaaagtagacgctttttgaggttgagcatatttcgattaaatcttggcttaggccctagatcaagggtttagatcagaataaaatgaaaattagtgttgcacgtacgcatattgcatcagaatcttgcagtgattgttttagtttcctgagttgcattgatagattcttttaaaatatgactgatttgcataactttagaagcagaatcattttcagtatatatggtgcacattgagggcaaaaagtagttttgttaatgtttaaacttaagttacctacaactttgaactgtatgtagaagttttgtagtttgaagtcaatagtgccataatataccttataaggcgttcttactagatctttgttatatttacctttttctctccctatggggtgatgtaggatagtgcttgaaatttgcacttcagtagcatttaatgttcagtgctcttgtcataaacatagaatggatattgagtagtttctgatcccagatggtaatgtgtaggttcaagggtattgtgtgtagcaagtgaagattgcagaaataaaacttcagttcatgcttgaaatttaagtattgttgtgatgccagaattgctgctcaccgtttttaggtttcaggtcctctgacaccttttggtatcgttaattttactgatttgtgtagaatgtcagttgtattttaccagctaatatctagaaatgctggcaagaggggtttactccagctttagattgtaggtatgttagcttttttcatacagtgtattaaatttactgagtcagcttgctgaataagacagaagcccaagaattttaacagtgtgtagctttagttgtctaaaagttaggccttcgggcttcaaaagttagtggtcatcgaaaagcattaatctttgcagtttcaggtacaacacattggttttgattagggatggggatggggccctctttttgcagaatggggaaagtattgacaggaattgagagctattggtaggccagtgtataaggtatgtgaaaacagaattaagttattggtctgaagtgactgaagcatttaggctctatcaaggcctaaaatttggtaatatgagtttggtaatgcgaattgtggcagtggacaatatttagttaaaattatgtaattgcataagtactagcacagtatttttaataaaagttatttcttagcaaatgtcagttgcattttgtctaaaggtagagtgacactacagtgtctatatgtcctgctaaaaattgtggggaatatttttttttaagacagcgtttatatcgggagaggttttattccgttggattatgttagctgcatataaatgtgcacagttaattttgcccaagtttttgttttgaaatgaatgtaaaacttactgaagaagtagcttcccaaaatttagttttctgttaagccaaaaatattattttaaaagagtatttgcaaattttgaagttgacattaattgagaatgttactaaggctaaactggacccgcttgcccagaagataattatggaaaaattcttttgtgacttccaaagcagtctactattagcatgaattactgacagtcatccaaatatataggaacaaaaaattaaatgt

SEQ ID NO: 867 - DNA, 4045 bp, Homo sapiens
gcagcgtggtcacctggtccttttcacctgtgcacaggtaacctcagactcgagtcagtgacactgctcaacgcacccatctcagctttcatcatcagtcctccacccccgccccacaacagcctaccctgcctccggctgggtttctgggcagaggccgaggcttagctcgttatcctcgcctcgcgttgctgcaaaagccgcagcaagtgcagctgcaggctggcggctgggaaccggcccgagcaagccccaggcagctacactgggcatgctcagtagagcctgcggcttggggactctgcgctcgcacccagagctaccgctctgccccctcctaccgccccctgccctgccctgccctcccctcgcccggcgcggtcccgtccgcctctcgctcgcctcccgcctcccctcggtcttccgaggcgcccgggctcccggcgcggcggcggagggggcgggcaggccggcgggcggtgatgtggcgggactctttatgcgctgcggcaggatacgcgctcggcgctgggacgcgactgcgctcagttctctcctctcggaagctgcagccatgatggaagtttgagagttgagccgctgtgaggcgaggccgggctcaggcgagggagatgagagacggcggcggccgcggcccggagcccctctcagcgcctgtgagcagccgcgggggcagcgccctcggggagccggccggcctgcggcggcggcagcggcggcgtttctcgcctcctcttcgtcttttctaaccgtgcagcctcttcctcggcttctcctgaaagggaaggtggaagccgtgggctcgggcgggagccggctgaggcgcggcggcggcggcggcacctcccgctcctggagcgggggggagaagcggcggcggcggcggccgcggcggctgcagctccagggagggggtctgagtcgcctgtcaccatttccagggctgggaacgccggagagttggtctctccccttctactgcctccaacacggcggcggcggcggctggcacatccagggacccgggccggttttaaacctcccgtgcgccgccgccgcaccccccgtggcccgggctccggaggccgccggcggaggcagccgttcggaggattattcgtcttctccccattccgctgccgccgctgccaggcctctggctgctgaggagaagcaggcccagtcgctgcaaccatccagcagccgccgcagcagccattacccggctgcggtccagagccaagcggcggcagagcgaggggcatcagctaccgccaagtccagagccatttccatcctgcagaagaagccccgccaccagcagcttctgccatctctctcctcctttttcttcagccacaggctcccagacatgacagccatcatcaaagagatcgttagcagaaacaaaaggagatatcaagaggatggattcgacttagacttgacctgtatccatttctgcggctgctcctctttacctttctgtcactctcttagaacgtgggagtagacggatgcgaaaatgtccgtagtttgggtgactataacatttaaccctggtcaggttgctaggtcatatattttgtgtttcctttctgtgtattcaacctagggtgtgtttggctagacggaactcttgcctggttgcaagtgtcaagccaccgattgctttcttaggctatctatatggtctcttcctgagggctattgtccgttaatacagaatacagtacactgttagtggattagcgagctcggtaatccggtctcctaaatgaacaaaaaagtagacgctttttgaggttgagcatatttcgattaaatcttggcttaggccctagatcaagggtttagatcagaataaaatgaaaattagtgttgcacgtacgcatattgcatcagaatcttgcagtgattgttttagtttcctgagttgcattgatagattcttttaaaatatgactgatttgcataactttagaagcagaatcattttcagtatatatggtgcacattgagggcaaaaagtagttttgttaatgtttaaacttaagttacctacaactttgaactgtatgtagaagttttgtagtttgaagtcaatagtgccataatataccttataaggcgttcttactagatctttgttatatttacctttttctctccctatggggtgatgtaggatagtgcttgaaatttgcacttcagtagcatttaatgttcagtgctcttgtcataaacatagaatggatattgagtagtttctgatcccagatggtaatgtgtaggttcaagggtattgtgtgtagcaagtgaagattgcagaaataaaacttcagttcatgcttgaaatttaagtattgttgtgatgccagaattgctgctcaccgtttttaggtttcaggtcctctgacaccttttggtatcgttaattttactgatttgtgtagaatgtcagttgtattttaccagctaatatctagaaatgctggcaagaggggtttactccagctttagattgtaggtatgttagcttttttcatacagtgtattaaatttactgagtcagcttgctgaataagacagaagcccaagaattttaacagtgtgtagctttagttgtctaaaagttaggccttcgggcttcaaaagttagtggtcatcgaaaagcattaatctttgcagtttcaggtacaacacattggttttgattagggatggggatggggccctctttttgcagaatggggaaagtattgacaggaattgagagctattggtaggccagtgtataaggtatgtgaaaacagaattaagttattggtctgaagtgactgaagcatttaggctctatcaaggcctaaaatttggtaatatgagtttggtaatgcgaattgtggcagtggacaatatttagttaaaattatgtaattgcataagtactagcacagtatttttaataaaagttatttcttagcaaatgtcagttgcattttgtctaaaggtagagtgacactacagtgtctatatgtcctgctaaaaattgtggggaatatttttttttaagacagcgtttatatcgggagaggttttattccgttggattatgttagctgcatataaatgtgcacagttaattttgcccaagtttttgttttgaaatgaatgtaaaacttactgaagaagtagcttcccaaaatttagttttctgttaagccaaaaatattattttaaaagagtatttgcaaattttgaagttgacattaattgagaatgttactaaggctaaactggacccgcttgcccagaagataattatggaaaaattcttttgtgacttccaaagcagtctactattagcatgaattactgacagtcatccaaatatataggaacaaaaaattaaatgtttatgtaactttgaaaaaaaagcctttgaagaaaataattgaatgctgtctgggagacagatttctttcagcacttaaagtacataacacactacttttacttttcccacttgattttaaattatcagggttattaagaccttaaaattattttaccaggtttttacatgtgagctgtgacatgactggcattttctttgatttcagcgtatgttggtctctacacatgaaatttgtgtgacttaaaactttctctaaaactgtacttttagttatgatatgcatagaaagcagtatcaaatattgcgtcaaatgactaataacacttaatttctagagttgtggttttattgagccaaaagttgatatgaaaaaaagtcagtaaggaaagtcagtgaagtgcttgcttttttgataattgcactcccaataattttgatattccaacgtacttggtttgcttgttttcacgttaatgttttctgtttattggagtgggaaggcattaaaattgtcattgaagactttgtctttgacatgttgtagtatttatttcagtaactaacctgtgaaaagttaaattcctttatgaaagtagtgattggagt

SEQ ID NO: 868 - DNA, 4044 bp, Homo sapiens
atcagtcctccacccccgccccacaacagcctaccctgcctccggctgggtttctgggcagaggccgaggcttagctcgttatcctcgcctcgcgttgctgcaaaagccgcagcaagtgcagctgcaggctggcggctgggaaccggcccgagcaagccccaggcagctacactgggcatgctcagtagagcctgcggcttggggactctgcgctcgcacccagagctaccgctctgccccctcctaccgccccctgccctgccctgccctcccctcgcccggcgcggtcccgtccgcctctcgctcgcctcccgcctcccctcggtcttccgaggcgcccgggctcccggcgcggcggcggagggggcgggcaggccggcgggcggtgatgtggcgggactctttatgcgctgcggcaggatacgcgctcggcgctgggacgcgactgcgctcagttctctcctctcggaagctgcagccatgatggaagtttgagagttgagccgctgtgaggcgaggccgggctcaggcgagggagatgagagacggcggcggccgcggcccggagcccctctcagcgcctgtgagcagccgcgggggcagcgccctcggggagccggccggcctgcggcggcggcagcggcggcgtttctcgcctcctcttcgtcttttctaaccgtgcagcctcttcctcggcttctcctgaaagggaaggtggaagccgtgggctcgggcgggagccggctgaggcgcggcggcggcggcggcacctcccgctcctggagcgggggggagaagcggcggcggcggcggccgcggcggctgcagctccagggagggggtctgagtcgcctgtcaccatttccagggctgggaacgccggagagttggtctctccccttctactgcctccaacacggcggcggcggcggctggcacatccagggacccgggccggttttaaacctcccgtgcgccgccgccgcaccccccgtggcccgggctccggaggccgccggcggaggcagccgttcggaggattattcgtcttctccccattccgctgccgccgctgccaggcctctggctgctgaggagaagcaggcccagtcgctgcaaccatccagcagccgccgcagcagccattacccggctgcggtccagagccaagcggcggcagagcgaggggcatcagctaccgccaagtccagagccatttccatcctgcagaagaagccccgccaccagcagcttctgccatctctctcctcctttttcttcagccacaggctcccagacatgacagccatcatcaaagagatcgttagcagaaacaaaaggagatatcaagaggatggattcgacttagacttgacctgtatccatttctgcggctgctcctctttacctttctgtcactctcttagaacgtgggagtagacggatgcgaaaatgtccgtagtttgggtgactataacatttaaccctggtcaggttgctaggtcatatattttgtgtttcctttctgtgtattcaacctagggtgtgtttggctagacggaactcttgcctggttgcaagtgtcaagccaccgattgctttcttaggctatctatatggtctcttcctgagggctattgtccgttaatacagaatacagtacactgttagtggattagcgagctcggtaatccggtctcctaaatgaacaaaaaagtagacgctttttgaggttgagcatatttcgattaaatcttggcttaggccctagatcaagggtttagatcagaataaaatgaaaattagtgttgcacgtacgcatattgcatcagaatcttgcagtgattgttttagtttcctgagttgcattgatagattcttttaaaatatgactgatttgcataactttagaagcagaatcattttcagtatatatggtgcacattgagggcaaaaagtagttttgttaatgtttaaacttaagttacctacaactttgaactgtatgtagaagttttgtagtttgaagtcaatagtgccataatataccttataaggcgttcttactagatctttgttatatttacctttttctctccctatggggtgatgtaggatagtgcttgaaatttgcacttcagtagcatttaatgttcagtgctcttgtcataaacatagaatggatattgagtagtttctgatcccagatggtaatgtgtaggttcaagggtattgtgtgtagcaagtgaagattgcagaaataaaacttcagttcatgcttgaaatttaagtattgttgtgatgccagaattgctgctcaccgtttttaggtttcaggtcctctgacaccttttggtatcgttaattttactgatttgtgtagaatgtcagttgtattttaccagctaatatctagaaatgctggcaagaggggtttactccagctttagattgtaggtatgttagcttttttcatacagtgtattaaatttactgagtcagcttgctgaataagacagaagcccaagaattttaacagtgtgtagctttagttgtctaaaagttaggccttcgggcttcaaaagttagtggtcatcgaaaagcattaatctttgcagtttcaggtacaacacattggttttgattagggatggggatggggccctctttttgcagaatggggaaagtattgacaggaattgagagctattggtaggccagtgtataaggtatgtgaaaacagaattaagttattggtctgaagtgactgaagcatttaggctctatcaaggcctaaaatttggtaatatgagtttggtaatgcgaattgtggcagtggacaatatttagttaaaattatgtaattgcataagtactagcacagtatttttaataaaagttatttcttagcaaatgtcagttgcattttgtctaaaggtagagtgacactacagtgtctatatgtcctgctaaaaattgtggggaatatttttttttaagacagcgtttatatcgggagaggttttattccgttggattatgttagctgcatataaatgtgcacagttaattttgcccaagtttttgttttgaaatgaatgtaaaacttactgaagaagtagcttcccaaaatttagttttctgttaagccaaaaatattattttaaaagagtatttgcaaattttgaagttgacattaattgagaatgttactaaggctaaactggacccgcttgcccagaagataattatggaaaaattcttttgtgacttccaaagcagtctactattagcatgaattactgacagtcatccaaatatataggaacaaaaaattaaatgtttatgtaactttgaaaaaaaagcctttgaagaaaataattgaatgctgtctgggagacagatttctttcagcacttaaagtacataacacactacttttacttttcccacttgattttaaattatcagggttattaagaccttaaaattattttaccaggtttttacatgtgagctgtgacatgactggcattttctttgatttcagcgtatgttggtctctacacatgaaatttgtgtgacttaaaactttctctaaaactgtacttttagttatgatatgcatagaaagcagtatcaaatattgcgtcaaatgactaataacacttaatttctagagttgtggttttattgagccaaaagttgatatgaaaaaaagtcagtaaggaaagtcagtgaagtgcttgcttttttgataattgcactcccaataattttgatattccaacgtacttggtttgcttgttttcacgttaatgttttctgtttattggagtgggaaggcattaaaattgtcattgaagactttgtctttgacatgttgtagtatttatttcagtaactaacctgtgaaaagttaaattcctttatgaaagtagtgattggagtatttttatctgataaagaaagattaataatgaagccatttctccgaggaaaattgaggacaataattcagttttaaaatattatcgcaaaat

SEQ ID NO: 869 - DNA, 4048 bp, Homo sapiens
ggaagctgcagccatgatggaagtttgagagttgagccgctgtgaggcgaggccgggctcaggcgagggagatgagagacggcggcggccgcggcccggagcccctctcagcgcctgtgagcagccgcgggggcagcgccctcggggagccggccggcctgcggcggcggcagcggcggcgtttctcgcctcctcttcgtcttttctaaccgtgcagcctcttcctcggcttctcctgaaagggaaggtggaagccgtgggctcgggcgggagccggctgaggcgcggcggcggcggcggcacctcccgctcctggagcgggggggagaagcggcggcggcggcggccgcggcggctgcagctccagggagggggtctgagtcgcctgtcaccatttccagggctgggaacgccggagagttggtctctccccttctactgcctccaacacggcggcggcggcggctggcacatccagggacccgggccggttttaaacctcccgtgcgccgccgccgcaccccccgtggcccgggctccggaggccgccggcggaggcagccgttcggaggattattcgtcttctccccattccgctgccgccgctgccaggcctctggctgctgaggagaagcaggcccagtcgctgcaaccatccagcagccgccgcagcagccattacccggctgcggtccagagccaagcggcggcagagcgaggggcatcagctaccgccaagtccagagccatttccatcctgcagaagaagccccgccaccagcagcttctgccatctctctcctcctttttcttcagccacaggctcccagacatgacagccatcatcaaagagatcgttagcagaaacaaaaggagatatcaagaggatggattcgacttagacttgacctgtatccatttctgcggctgctcctctttacctttctgtcactctcttagaacgtgggagtagacggatgcgaaaatgtccgtagtttgggtgactataacatttaaccctggtcaggttgctaggtcatatattttgtgtttcctttctgtgtattcaacctagggtgtgtttggctagacggaactcttgcctggttgcaagtgtcaagccaccgattgctttcttaggctatctatatggtctcttcctgagggctattgtccgttaatacagaatacagtacactgttagtggattagcgagctcggtaatccggtctcctaaatgaacaaaaaagtagacgctttttgaggttgagcatatttcgattaaatcttggcttaggccctagatcaagggtttagatcagaataaaatgaaaattagtgttgcacgtacgcatattgcatcagaatcttgcagtgattgttttagtttcctgagttgcattgatagattcttttaaaatatgactgatttgcataactttagaagcagaatcattttcagtatatatggtgcacattgagggcaaaaagtagttttgttaatgtttaaacttaagttacctacaactttgaactgtatgtagaagttttgtagtttgaagtcaatagtgccataatataccttataaggcgttcttactagatctttgttatatttacctttttctctccctatggggtgatgtaggatagtgcttgaaatttgcacttcagtagcatttaatgttcagtgctcttgtcataaacatagaatggatattgagtagtttctgatcccagatggtaatgtgtaggttcaagggtattgtgtgtagcaagtgaagattgcagaaataaaacttcagttcatgcttgaaatttaagtattgttgtgatgccagaattgctgctcaccgtttttaggtttcaggtcctctgacaccttttggtatcgttaattttactgatttgtgtagaatgtcagttgtattttaccagctaatatctagaaatgctggcaagaggggtttactccagctttagattgtaggtatgttagcttttttcatacagtgtattaaatttactgagtcagcttgctgaataagacagaagcccaagaattttaacagtgtgtagctttagttgtctaaaagttaggccttcgggcttcaaaagttagtggtcatcgaaaagcattaatctttgcagtttcaggtacaacacattggttttgattagggatggggatggggccctctttttgcagaatggggaaagtattgacaggaattgagagctattggtaggccagtgtataaggtatgtgaaaacagaattaagttattggtctgaagtgactgaagcatttaggctctatcaaggcctaaaatttggtaatatgagtttggtaatgcgaattgtggcagtggacaatatttagttaaaattatgtaattgcataagtactagcacagtatttttaataaaagttatttcttagcaaatgtcagttgcattttgtctaaaggtagagtgacactacagtgtctatatgtcctgctaaaaattgtggggaatatttttttttaagacagcgtttatatcgggagaggttttattccgttggattatgttagctgcatataaatgtgcacagttaattttgcccaagtttttgttttgaaatgaatgtaaaacttactgaagaagtagcttcccaaaatttagttttctgttaagccaaaaatattattttaaaagagtatttgcaaattttgaagttgacattaattgagaatgttactaaggctaaactggacccgcttgcccagaagataattatggaaaaattcttttgtgacttccaaagcagtctactattagcatgaattactgacagtcatccaaatatataggaacaaaaaattaaatgtttatgtaactttgaaaaaaaagcctttgaagaaaataattgaatgctgtctgggagacagatttctttcagcacttaaagtacataacacactacttttacttttcccacttgattttaaattatcagggttattaagaccttaaaattattttaccaggtttttacatgtgagctgtgacatgactggcattttctttgatttcagcgtatgttggtctctacacatgaaatttgtgtgacttaaaactttctctaaaactgtacttttagttatgatatgcatagaaagcagtatcaaatattgcgtcaaatgactaataacacttaatttctagagttgtggttttattgagccaaaagttgatatgaaaaaaagtcagtaaggaaagtcagtgaagtgcttgcttttttgataattgcactcccaataattttgatattccaacgtacttggtttgcttgttttcacgttaatgttttctgtttattggagtgggaaggcattaaaattgtcattgaagactttgtctttgacatgttgtagtatttatttcagtaactaacctgtgaaaagttaaattcctttatgaaagtagtgattggagtatttttatctgataaagaaagattaataatgaagccatttctccgaggaaaattgaggacaataattcagttttaaaatattatcgcaaaattaaattattctaaaaatttgttagtagggttatatgcttaatattagtctgaaatatagtgctgaatttgagactatagaaaaattaagtgtatttagggtatgtggaaacgttaggcttctgttgtatttttattgtttggtagatttgcctcttttcaaataaatgttcacagggaatacttttaacttgtagagagtacagtgactattgaagttacctaaattacctcaaggtaagtgattactgaaattaatcatgagggttttaaaaagtattctattcacaacatttattttacattgttttgtatctgctaagttatatttcctgaaaaacatgactggaccacctaattgctgtatgataacttacaaacttcatttttcatagtgcttattcaagtgtaaagcacaactgaaaggagtaatgtacagtttatatgaggaaaaaggaattttattgctgccag

SEQ ID NO: 870 - DNA, 4058 bp, Homo sapiens
cggccggcctgcggcggcggcagcggcggcgtttctcgcctcctcttcgtcttttctaaccgtgcagcctcttcctcggcttctcctgaaagggaaggtggaagccgtgggctcgggcgggagccggctgaggcgcggcggcggcggcggcacctcccgctcctggagcgggggggagaagcggcggcggcggcggccgcggcggctgcagctccagggagggggtctgagtcgcctgtcaccatttccagggctgggaacgccggagagttggtctctccccttctactgcctccaacacggcggcggcggcggctggcacatccagggacccgggccggttttaaacctcccgtgcgccgccgccgcaccccccgtggcccgggctccggaggccgccggcggaggcagccgttcggaggattattcgtcttctccccattccgctgccgccgctgccaggcctctggctgctgaggagaagcaggcccagtcgctgcaaccatccagcagccgccgcagcagccattacccggctgcggtccagagccaagcggcggcagagcgaggggcatcagctaccgccaagtccagagccatttccatcctgcagaagaagccccgccaccagcagcttctgccatctctctcctcctttttcttcagccacaggctcccagacatgacagccatcatcaaagagatcgttagcagaaacaaaaggagatatcaagaggatggattcgacttagacttgacctgtatccatttctgcggctgctcctctttacctttctgtcactctcttagaacgtgggagtagacggatgcgaaaatgtccgtagtttgggtgactataacatttaaccctggtcaggttgctaggtcatatattttgtgtttcctttctgtgtattcaacctagggtgtgtttggctagacggaactcttgcctggttgcaagtgtcaagccaccgattgctttcttaggctatctatatggtctcttcctgagggctattgtccgttaatacagaatacagtacactgttagtggattagcgagctcggtaatccggtctcctaaatgaacaaaaaagtagacgctttttgaggttgagcatatttcgattaaatcttggcttaggccctagatcaagggtttagatcagaataaaatgaaaattagtgttgcacgtacgcatattgcatcagaatcttgcagtgattgttttagtttcctgagttgcattgatagattcttttaaaatatgactgatttgcataactttagaagcagaatcattttcagtatatatggtgcacattgagggcaaaaagtagttttgttaatgtttaaacttaagttacctacaactttgaactgtatgtagaagttttgtagtttgaagtcaatagtgccataatataccttataaggcgttcttactagatctttgttatatttacctttttctctccctatggggtgatgtaggatagtgcttgaaatttgcacttcagtagcatttaatgttcagtgctcttgtcataaacatagaatggatattgagtagtttctgatcccagatggtaatgtgtaggttcaagggtattgtgtgtagcaagtgaagattgcagaaataaaacttcagttcatgcttgaaatttaagtattgttgtgatgccagaattgctgctcaccgtttttaggtttcaggtcctctgacaccttttggtatcgttaattttactgatttgtgtagaatgtcagttgtattttaccagctaatatctagaaatgctggcaagaggggtttactccagctttagattgtaggtatgttagcttttttcatacagtgtattaaatttactgagtcagcttgctgaataagacagaagcccaagaattttaacagtgtgtagctttagttgtctaaaagttaggccttcgggcttcaaaagttagtggtcatcgaaaagcattaatctttgcagtttcaggtacaacacattggttttgattagggatggggatggggccctctttttgcagaatggggaaagtattgacaggaattgagagctattggtaggccagtgtataaggtatgtgaaaacagaattaagttattggtctgaagtgactgaagcatttaggctctatcaaggcctaaaatttggtaatatgagtttggtaatgcgaattgtggcagtggacaatatttagttaaaattatgtaattgcataagtactagcacagtatttttaataaaagttatttcttagcaaatgtcagttgcattttgtctaaaggtagagtgacactacagtgtctatatgtcctgctaaaaattgtggggaatatttttttttaagacagcgtttatatcgggagaggttttattccgttggattatgttagctgcatataaatgtgcacagttaattttgcccaagtttttgttttgaaatgaatgtaaaacttactgaagaagtagcttcccaaaatttagttttctgttaagccaaaaatattattttaaaagagtatttgcaaattttgaagttgacattaattgagaatgttactaaggctaaactggacccgcttgcccagaagataattatggaaaaattcttttgtgacttccaaagcagtctactattagcatgaattactgacagtcatccaaatatataggaacaaaaaattaaatgtttatgtaactttgaaaaaaaagcctttgaagaaaataattgaatgctgtctgggagacagatttctttcagcacttaaagtacataacacactacttttacttttcccacttgattttaaattatcagggttattaagaccttaaaattattttaccaggtttttacatgtgagctgtgacatgactggcattttctttgatttcagcgtatgttggtctctacacatgaaatttgtgtgacttaaaactttctctaaaactgtacttttagttatgatatgcatagaaagcagtatcaaatattgcgtcaaatgactaataacacttaatttctagagttgtggttttattgagccaaaagttgatatgaaaaaaagtcagtaaggaaagtcagtgaagtgcttgcttttttgataattgcactcccaataattttgatattccaacgtacttggtttgcttgttttcacgttaatgttttctgtttattggagtgggaaggcattaaaattgtcattgaagactttgtctttgacatgttgtagtatttatttcagtaactaacctgtgaaaagttaaattcctttatgaaagtagtgattggagtatttttatctgataaagaaagattaataatgaagccatttctccgaggaaaattgaggacaataattcagttttaaaatattatcgcaaaattaaattattctaaaaatttgttagtagggttatatgcttaatattagtctgaaatatagtgctgaatttgagactatagaaaaattaagtgtatttagggtatgtggaaacgttaggcttctgttgtatttttattgtttggtagatttgcctcttttcaaataaatgttcacagggaatacttttaacttgtagagagtacagtgactattgaagttacctaaattacctcaaggtaagtgattactgaaattaatcatgagggttttaaaaagtattctattcacaacatttattttacattgttttgtatctgctaagttatatttcctgaaaaacatgactggaccacctaattgctgtatgataacttacaaacttcatttttcatagtgcttattcaagtgtaaagcacaactgaaaggagtaatgtacagtttatatgaggaaaaaggaattttattgctgccagtgtaaaagtttgcacagcagtatagtcatcaatgcagatttacattgcttataatatactaagtaaatactaaatgattaaagataataaaatatggtgaggtataaccaccttcattttaaacttagttttagaagatagtaaagaaagattcctttat

SEQ ID NO: 871 - DNA, 4046 bp, Homo sapiens
gtctctccccttctactgcctccaacacggcggcggcggcggctggcacatccagggacccgggccggttttaaacctcccgtgcgccgccgccgcaccccccgtggcccgggctccggaggccgccggcggaggcagccgttcggaggattattcgtcttctccccattccgctgccgccgctgccaggcctctggctgctgaggagaagcaggcccagtcgctgcaaccatccagcagccgccgcagcagccattacccggctgcggtccagagccaagcggcggcagagcgaggggcatcagctaccgccaagtccagagccatttccatcctgcagaagaagccccgccaccagcagcttctgccatctctctcctcctttttcttcagccacaggctcccagacatgacagccatcatcaaagagatcgttagcagaaacaaaaggagatatcaagaggatggattcgacttagacttgacctgtatccatttctgcggctgctcctctttacctttctgtcactctcttagaacgtgggagtagacggatgcgaaaatgtccgtagtttgggtgactataacatttaaccctggtcaggttgctaggtcatatattttgtgtttcctttctgtgtattcaacctagggtgtgtttggctagacggaactcttgcctggttgcaagtgtcaagccaccgattgctttcttaggctatctatatggtctcttcctgagggctattgtccgttaatacagaatacagtacactgttagtggattagcgagctcggtaatccggtctcctaaatgaacaaaaaagtagacgctttttgaggttgagcatatttcgattaaatcttggcttaggccctagatcaagggtttagatcagaataaaatgaaaattagtgttgcacgtacgcatattgcatcagaatcttgcagtgattgttttagtttcctgagttgcattgatagattcttttaaaatatgactgatttgcataactttagaagcagaatcattttcagtatatatggtgcacattgagggcaaaaagtagttttgttaatgtttaaacttaagttacctacaactttgaactgtatgtagaagttttgtagtttgaagtcaatagtgccataatataccttataaggcgttcttactagatctttgttatatttacctttttctctccctatggggtgatgtaggatagtgcttgaaatttgcacttcagtagcatttaatgttcagtgctcttgtcataaacatagaatggatattgagtagtttctgatcccagatggtaatgtgtaggttcaagggtattgtgtgtagcaagtgaagattgcagaaataaaacttcagttcatgcttgaaatttaagtattgttgtgatgccagaattgctgctcaccgtttttaggtttcaggtcctctgacaccttttggtatcgttaattttactgatttgtgtagaatgtcagttgtattttaccagctaatatctagaaatgctggcaagaggggtttactccagctttagattgtaggtatgttagcttttttcatacagtgtattaaatttactgagtcagcttgctgaataagacagaagcccaagaattttaacagtgtgtagctttagttgtctaaaagttaggccttcgggcttcaaaagttagtggtcatcgaaaagcattaatctttgcagtttcaggtacaacacattggttttgattagggatggggatggggccctctttttgcagaatggggaaagtattgacaggaattgagagctattggtaggccagtgtataaggtatgtgaaaacagaattaagttattggtctgaagtgactgaagcatttaggctctatcaaggcctaaaatttggtaatatgagtttggtaatgcgaattgtggcagtggacaatatttagttaaaattatgtaattgcataagtactagcacagtatttttaataaaagttatttcttagcaaatgtcagttgcattttgtctaaaggtagagtgacactacagtgtctatatgtcctgctaaaaattgtggggaatatttttttttaagacagcgtttatatcgggagaggttttattccgttggattatgttagctgcatataaatgtgcacagttaattttgcccaagtttttgttttgaaatgaatgtaaaacttactgaagaagtagcttcccaaaatttagttttctgttaagccaaaaatattattttaaaagagtatttgcaaattttgaagttgacattaattgagaatgttactaaggctaaactggacccgcttgcccagaagataattatggaaaaattcttttgtgacttccaaagcagtctactattagcatgaattactgacagtcatccaaatatataggaacaaaaaattaaatgtttatgtaactttgaaaaaaaagcctttgaagaaaataattgaatgctgtctgggagacagatttctttcagcacttaaagtacataacacactacttttacttttcccacttgattttaaattatcagggttattaagaccttaaaattattttaccaggtttttacatgtgagctgtgacatgactggcattttctttgatttcagcgtatgttggtctctacacatgaaatttgtgtgacttaaaactttctctaaaactgtacttttagttatgatatgcatagaaagcagtatcaaatattgcgtcaaatgactaataacacttaatttctagagttgtggttttattgagccaaaagttgatatgaaaaaaagtcagtaaggaaagtcagtgaagtgcttgcttttttgataattgcactcccaataattttgatattccaacgtacttggtttgcttgttttcacgttaatgttttctgtttattggagtgggaaggcattaaaattgtcattgaagactttgtctttgacatgttgtagtatttatttcagtaactaacctgtgaaaagttaaattcctttatgaaagtagtgattggagtatttttatctgataaagaaagattaataatgaagccatttctccgaggaaaattgaggacaataattcagttttaaaatattatcgcaaaattaaattattctaaaaatttgttagtagggttatatgcttaatattagtctgaaatatagtgctgaatttgagactatagaaaaattaagtgtatttagggtatgtggaaacgttaggcttctgttgtatttttattgtttggtagatttgcctcttttcaaataaatgttcacagggaatacttttaacttgtagagagtacagtgactattgaagttacctaaattacctcaaggtaagtgattactgaaattaatcatgagggttttaaaaagtattctattcacaacatttattttacattgttttgtatctgctaagttatatttcctgaaaaacatgactggaccacctaattgctgtatgataacttacaaacttcatttttcatagtgcttattcaagtgtaaagcacaactgaaaggagtaatgtacagtttatatgaggaaaaaggaattttattgctgccagtgtaaaagtttgcacagcagtatagtcatcaatgcagatttacattgcttataatatactaagtaaatactaaatgattaaagataataaaatatggtgaggtataaccaccttcattttaaacttagttttagaagatagtaaagaaagattcctttattacctttttagaattttatttttaataacatgggaaaggcaactggtgatattttaatttttgtatggaacagtgcatctgctttctcatagccacataaaatacataaacttcttagtgttatgaaatggcttactttttggaagtgaagaagtcttcaattcttattttctaatgttattttgaaatttgcctccatttgctgtttgttcatttggtgatagcgcaacacttaaaaaaatattttaagccgcttctgaa

SEQ ID NO: 872 - DNA, 4025 bp, Homo sapiens
accccccgtggcccgggctccggaggccgccggcggaggcagccgttcggaggattattcgtcttctccccattccgctgccgccgctgccaggcctctggctgctgaggagaagcaggcccagtcgctgcaaccatccagcagccgccgcagcagccattacccggctgcggtccagagccaagcggcggcagagcgaggggcatcagctaccgccaagtccagagccatttccatcctgcagaagaagccccgccaccagcagcttctgccatctctctcctcctttttcttcagccacaggctcccagacatgacagccatcatcaaagagatcgttagcagaaacaaaaggagatatcaagaggatggattcgacttagacttgacctgtatccatttctgcggctgctcctctttacctttctgtcactctcttagaacgtgggagtagacggatgcgaaaatgtccgtagtttgggtgactataacatttaaccctggtcaggttgctaggtcatatattttgtgtttcctttctgtgtattcaacctagggtgtgtttggctagacggaactcttgcctggttgcaagtgtcaagccaccgattgctttcttaggctatctatatggtctcttcctgagggctattgtccgttaatacagaatacagtacactgttagtggattagcgagctcggtaatccggtctcctaaatgaacaaaaaagtagacgctttttgaggttgagcatatttcgattaaatcttggcttaggccctagatcaagggtttagatcagaataaaatgaaaattagtgttgcacgtacgcatattgcatcagaatcttgcagtgattgttttagtttcctgagttgcattgatagattcttttaaaatatgactgatttgcataactttagaagcagaatcattttcagtatatatggtgcacattgagggcaaaaagtagttttgttaatgtttaaacttaagttacctacaactttgaactgtatgtagaagttttgtagtttgaagtcaatagtgccataatataccttataaggcgttcttactagatctttgttatatttacctttttctctccctatggggtgatgtaggatagtgcttgaaatttgcacttcagtagcatttaatgttcagtgctcttgtcataaacatagaatggatattgagtagtttctgatcccagatggtaatgtgtaggttcaagggtattgtgtgtagcaagtgaagattgcagaaataaaacttcagttcatgcttgaaatttaagtattgttgtgatgccagaattgctgctcaccgtttttaggtttcaggtcctctgacaccttttggtatcgttaattttactgatttgtgtagaatgtcagttgtattttaccagctaatatctagaaatgctggcaagaggggtttactccagctttagattgtaggtatgttagcttttttcatacagtgtattaaatttactgagtcagcttgctgaataagacagaagcccaagaattttaacagtgtgtagctttagttgtctaaaagttaggccttcgggcttcaaaagttagtggtcatcgaaaagcattaatctttgcagtttcaggtacaacacattggttttgattagggatggggatggggccctctttttgcagaatggggaaagtattgacaggaattgagagctattggtaggccagtgtataaggtatgtgaaaacagaattaagttattggtctgaagtgactgaagcatttaggctctatcaaggcctaaaatttggtaatatgagtttggtaatgcgaattgtggcagtggacaatatttagttaaaattatgtaattgcataagtactagcacagtatttttaataaaagttatttcttagcaaatgtcagttgcattttgtctaaaggtagagtgacactacagtgtctatatgtcctgctaaaaattgtggggaatatttttttttaagacagcgtttatatcgggagaggttttattccgttggattatgttagctgcatataaatgtgcacagttaattttgcccaagtttttgttttgaaatgaatgtaaaacttactgaagaagtagcttcccaaaatttagttttctgttaagccaaaaatattattttaaaagagtatttgcaaattttgaagttgacattaattgagaatgttactaaggctaaactggacccgcttgcccagaagataattatggaaaaattcttttgtgacttccaaagcagtctactattagcatgaattactgacagtcatccaaatatataggaacaaaaaattaaatgtttatgtaactttgaaaaaaaagcctttgaagaaaataattgaatgctgtctgggagacagatttctttcagcacttaaagtacataacacactacttttacttttcccacttgattttaaattatcagggttattaagaccttaaaattattttaccaggtttttacatgtgagctgtgacatgactggcattttctttgatttcagcgtatgttggtctctacacatgaaatttgtgtgacttaaaactttctctaaaactgtacttttagttatgatatgcatagaaagcagtatcaaatattgcgtcaaatgactaataacacttaatttctagagttgtggttttattgagccaaaagttgatatgaaaaaaagtcagtaaggaaagtcagtgaagtgcttgcttttttgataattgcactcccaataattttgatattccaacgtacttggtttgcttgttttcacgttaatgttttctgtttattggagtgggaaggcattaaaattgtcattgaagactttgtctttgacatgttgtagtatttatttcagtaactaacctgtgaaaagttaaattcctttatgaaagtagtgattggagtatttttatctgataaagaaagattaataatgaagccatttctccgaggaaaattgaggacaataattcagttttaaaatattatcgcaaaattaaattattctaaaaatttgttagtagggttatatgcttaatattagtctgaaatatagtgctgaatttgagactatagaaaaattaagtgtatttagggtatgtggaaacgttaggcttctgttgtatttttattgtttggtagatttgcctcttttcaaataaatgttcacagggaatacttttaacttgtagagagtacagtgactattgaagttacctaaattacctcaaggtaagtgattactgaaattaatcatgagggttttaaaaagtattctattcacaacatttattttacattgttttgtatctgctaagttatatttcctgaaaaacatgactggaccacctaattgctgtatgataacttacaaacttcatttttcatagtgcttattcaagtgtaaagcacaactgaaaggagtaatgtacagtttatatgaggaaaaaggaattttattgctgccagtgtaaaagtttgcacagcagtatagtcatcaatgcagatttacattgcttataatatactaagtaaatactaaatgattaaagataataaaatatggtgaggtataaccaccttcattttaaacttagttttagaagatagtaaagaaagattcctttattacctttttagaattttatttttaataacatgggaaaggcaactggtgatattttaatttttgtatggaacagtgcatctgctttctcatagccacataaaatacataaacttcttagtgttatgaaatggcttactttttggaagtgaagaagtcttcaattcttattttctaatgttattttgaaatttgcctccatttgctgtttgttcatttggtgatagcgcaacacttaaaaaaatattttaagccgcttctgaagtaatcacttcagtgacttttaatggaggagtatttgttatgggaaattcacttcacaaagttttaacattaatt

SEQ ID NO: 873 - DNA, 4046 bp, Homo sapiens
cccattccgctgccgccgctgccaggcctctggctgctgaggagaagcaggcccagtcgctgcaaccatccagcagccgccgcagcagccattacccggctgcggtccagagccaagcggcggcagagcgaggggcatcagctaccgccaagtccagagccatttccatcctgcagaagaagccccgccaccagcagcttctgccatctctctcctcctttttcttcagccacaggctcccagacatgacagccatcatcaaagagatcgttagcagaaacaaaaggagatatcaagaggatggattcgacttagacttgacctgtatccatttctgcggctgctcctctttacctttctgtcactctcttagaacgtgggagtagacggatgcgaaaatgtccgtagtttgggtgactataacatttaaccctggtcaggttgctaggtcatatattttgtgtttcctttctgtgtattcaacctagggtgtgtttggctagacggaactcttgcctggttgcaagtgtcaagccaccgattgctttcttaggctatctatatggtctcttcctgagggctattgtccgttaatacagaatacagtacactgttagtggattagcgagctcggtaatccggtctcctaaatgaacaaaaaagtagacgctttttgaggttgagcatatttcgattaaatcttggcttaggccctagatcaagggtttagatcagaataaaatgaaaattagtgttgcacgtacgcatattgcatcagaatcttgcagtgattgttttagtttcctgagttgcattgatagattcttttaaaatatgactgatttgcataactttagaagcagaatcattttcagtatatatggtgcacattgagggcaaaaagtagttttgttaatgtttaaacttaagttacctacaactttgaactgtatgtagaagttttgtagtttgaagtcaatagtgccataatataccttataaggcgttcttactagatctttgttatatttacctttttctctccctatggggtgatgtaggatagtgcttgaaatttgcacttcagtagcatttaatgttcagtgctcttgtcataaacatagaatggatattgagtagtttctgatcccagatggtaatgtgtaggttcaagggtattgtgtgtagcaagtgaagattgcagaaataaaacttcagttcatgcttgaaatttaagtattgttgtgatgccagaattgctgctcaccgtttttaggtttcaggtcctctgacaccttttggtatcgttaattttactgatttgtgtagaatgtcagttgtattttaccagctaatatctagaaatgctggcaagaggggtttactccagctttagattgtaggtatgttagcttttttcatacagtgtattaaatttactgagtcagcttgctgaataagacagaagcccaagaattttaacagtgtgtagctttagttgtctaaaagttaggccttcgggcttcaaaagttagtggtcatcgaaaagcattaatctttgcagtttcaggtacaacacattggttttgattagggatggggatggggccctctttttgcagaatggggaaagtattgacaggaattgagagctattggtaggccagtgtataaggtatgtgaaaacagaattaagttattggtctgaagtgactgaagcatttaggctctatcaaggcctaaaatttggtaatatgagtttggtaatgcgaattgtggcagtggacaatatttagttaaaattatgtaattgcataagtactagcacagtatttttaataaaagttatttcttagcaaatgtcagttgcattttgtctaaaggtagagtgacactacagtgtctatatgtcctgctaaaaattgtggggaatatttttttttaagacagcgtttatatcgggagaggttttattccgttggattatgttagctgcatataaatgtgcacagttaattttgcccaagtttttgttttgaaatgaatgtaaaacttactgaagaagtagcttcccaaaatttagttttctgttaagccaaaaatattattttaaaagagtatttgcaaattttgaagttgacattaattgagaatgttactaaggctaaactggacccgcttgcccagaagataattatggaaaaattcttttgtgacttccaaagcagtctactattagcatgaattactgacagtcatccaaatatataggaacaaaaaattaaatgtttatgtaactttgaaaaaaaagcctttgaagaaaataattgaatgctgtctgggagacagatttctttcagcacttaaagtacataacacactacttttacttttcccacttgattttaaattatcagggttattaagaccttaaaattattttaccaggtttttacatgtgagctgtgacatgactggcattttctttgatttcagcgtatgttggtctctacacatgaaatttgtgtgacttaaaactttctctaaaactgtacttttagttatgatatgcatagaaagcagtatcaaatattgcgtcaaatgactaataacacttaatttctagagttgtggttttattgagccaaaagttgatatgaaaaaaagtcagtaaggaaagtcagtgaagtgcttgcttttttgataattgcactcccaataattttgatattccaacgtacttggtttgcttgttttcacgttaatgttttctgtttattggagtgggaaggcattaaaattgtcattgaagactttgtctttgacatgttgtagtatttatttcagtaactaacctgtgaaaagttaaattcctttatgaaagtagtgattggagtatttttatctgataaagaaagattaataatgaagccatttctccgaggaaaattgaggacaataattcagttttaaaatattatcgcaaaattaaattattctaaaaatttgttagtagggttatatgcttaatattagtctgaaatatagtgctgaatttgagactatagaaaaattaagtgtatttagggtatgtggaaacgttaggcttctgttgtatttttattgtttggtagatttgcctcttttcaaataaatgttcacagggaatacttttaacttgtagagagtacagtgactattgaagttacctaaattacctcaaggtaagtgattactgaaattaatcatgagggttttaaaaagtattctattcacaacatttattttacattgttttgtatctgctaagttatatttcctgaaaaacatgactggaccacctaattgctgtatgataacttacaaacttcatttttcatagtgcttattcaagtgtaaagcacaactgaaaggagtaatgtacagtttatatgaggaaaaaggaattttattgctgccagtgtaaaagtttgcacagcagtatagtcatcaatgcagatttacattgcttataatatactaagtaaatactaaatgattaaagataataaaatatggtgaggtataaccaccttcattttaaacttagttttagaagatagtaaagaaagattcctttattacctttttagaattttatttttaataacatgggaaaggcaactggtgatattttaatttttgtatggaacagtgcatctgctttctcatagccacataaaatacataaacttcttagtgttatgaaatggcttactttttggaagtgaagaagtcttcaattcttattttctaatgttattttgaaatttgcctccatttgctgtttgttcatttggtgatagcgcaacacttaaaaaaatattttaagccgcttctgaagtaatcacttcagtgacttttaatggaggagtatttgttatgggaaattcacttcacaaagttttaacattaattcacttgaagtaaacgtgctatttttaaattttcatctcaatcttttaagtaagacgaaagcttaggaaatcacttttattattgatatt

SEQ ID NO: 874 - DNA, 4040 bp, Homo sapiens
cttcagccacaggctcccagacatgacagccatcatcaaagagatcgttagcagaaacaaaaggagatatcaagaggatggattcgacttagacttgacctgtatccatttctgcggctgctcctctttacctttctgtcactctcttagaacgtgggagtagacggatgcgaaaatgtccgtagtttgggtgactataacatttaaccctggtcaggttgctaggtcatatattttgtgtttcctttctgtgtattcaacctagggtgtgtttggctagacggaactcttgcctggttgcaagtgtcaagccaccgattgctttcttaggctatctatatggtctcttcctgagggctattgtccgttaatacagaatacagtacactgttagtggattagcgagctcggtaatccggtctcctaaatgaacaaaaaagtagacgctttttgaggttgagcatatttcgattaaatcttggcttaggccctagatcaagggtttagatcagaataaaatgaaaattagtgttgcacgtacgcatattgcatcagaatcttgcagtgattgttttagtttcctgagttgcattgatagattcttttaaaatatgactgatttgcataactttagaagcagaatcattttcagtatatatggtgcacattgagggcaaaaagtagttttgttaatgtttaaacttaagttacctacaactttgaactgtatgtagaagttttgtagtttgaagtcaatagtgccataatataccttataaggcgttcttactagatctttgttatatttacctttttctctccctatggggtgatgtaggatagtgcttgaaatttgcacttcagtagcatttaatgttcagtgctcttgtcataaacatagaatggatattgagtagtttctgatcccagatggtaatgtgtaggttcaagggtattgtgtgtagcaagtgaagattgcagaaataaaacttcagttcatgcttgaaatttaagtattgttgtgatgccagaattgctgctcaccgtttttaggtttcaggtcctctgacaccttttggtatcgttaattttactgatttgtgtagaatgtcagttgtattttaccagctaatatctagaaatgctggcaagaggggtttactccagctttagattgtaggtatgttagcttttttcatacagtgtattaaatttactgagtcagcttgctgaataagacagaagcccaagaattttaacagtgtgtagctttagttgtctaaaagttaggccttcgggcttcaaaagttagtggtcatcgaaaagcattaatctttgcagtttcaggtacaacacattggttttgattagggatggggatggggccctctttttgcagaatggggaaagtattgacaggaattgagagctattggtaggccagtgtataaggtatgtgaaaacagaattaagttattggtctgaagtgactgaagcatttaggctctatcaaggcctaaaatttggtaatatgagtttggtaatgcgaattgtggcagtggacaatatttagttaaaattatgtaattgcataagtactagcacagtatttttaataaaagttatttcttagcaaatgtcagttgcattttgtctaaaggtagagtgacactacagtgtctatatgtcctgctaaaaattgtggggaatatttttttttaagacagcgtttatatcgggagaggttttattccgttggattatgttagctgcatataaatgtgcacagttaattttgcccaagtttttgttttgaaatgaatgtaaaacttactgaagaagtagcttcccaaaatttagttttctgttaagccaaaaatattattttaaaagagtatttgcaaattttgaagttgacattaattgagaatgttactaaggctaaactggacccgcttgcccagaagataattatggaaaaattcttttgtgacttccaaagcagtctactattagcatgaattactgacagtcatccaaatatataggaacaaaaaattaaatgtttatgtaactttgaaaaaaaagcctttgaagaaaataattgaatgctgtctgggagacagatttctttcagcacttaaagtacataacacactacttttacttttcccacttgattttaaattatcagggttattaagaccttaaaattattttaccaggtttttacatgtgagctgtgacatgactggcattttctttgatttcagcgtatgttggtctctacacatgaaatttgtgtgacttaaaactttctctaaaactgtacttttagttatgatatgcatagaaagcagtatcaaatattgcgtcaaatgactaataacacttaatttctagagttgtggttttattgagccaaaagttgatatgaaaaaaagtcagtaaggaaagtcagtgaagtgcttgcttttttgataattgcactcccaataattttgatattccaacgtacttggtttgcttgttttcacgttaatgttttctgtttattggagtgggaaggcattaaaattgtcattgaagactttgtctttgacatgttgtagtatttatttcagtaactaacctgtgaaaagttaaattcctttatgaaagtagtgattggagtatttttatctgataaagaaagattaataatgaagccatttctccgaggaaaattgaggacaataattcagttttaaaatattatcgcaaaattaaattattctaaaaatttgttagtagggttatatgcttaatattagtctgaaatatagtgctgaatttgagactatagaaaaattaagtgtatttagggtatgtggaaacgttaggcttctgttgtatttttattgtttggtagatttgcctcttttcaaataaatgttcacagggaatacttttaacttgtagagagtacagtgactattgaagttacctaaattacctcaaggtaagtgattactgaaattaatcatgagggttttaaaaagtattctattcacaacatttattttacattgttttgtatctgctaagttatatttcctgaaaaacatgactggaccacctaattgctgtatgataacttacaaacttcatttttcatagtgcttattcaagtgtaaagcacaactgaaaggagtaatgtacagtttatatgaggaaaaaggaattttattgctgccagtgtaaaagtttgcacagcagtatagtcatcaatgcagatttacattgcttataatatactaagtaaatactaaatgattaaagataataaaatatggtgaggtataaccaccttcattttaaacttagttttagaagatagtaaagaaagattcctttattacctttttagaattttatttttaataacatgggaaaggcaactggtgatattttaatttttgtatggaacagtgcatctgctttctcatagccacataaaatacataaacttcttagtgttatgaaatggcttactttttggaagtgaagaagtcttcaattcttattttctaatgttattttgaaatttgcctccatttgctgtttgttcatttggtgatagcgcaacacttaaaaaaatattttaagccgcttctgaagtaatcacttcagtgacttttaatggaggagtatttgttatgggaaattcacttcacaaagttttaacattaattcacttgaagtaaacgtgctatttttaaattttcatctcaatcttttaagtaagacgaaagcttaggaaatcacttttattattgatattgtgtgtgacttcagagtttgtaaagagaattgtagaagtgttgcatgcatatgacaattttctgcttaattgaaatgtgaggcctctgccatactacaaggatttagcttccagaaaatgtaatattaacatagcttaagaaatgtatttttttttttctgtagaaaccgttgggttaaacaaacagttcagaagttttattacatggaacccatta

SEQ ID NO: 875 - DNA, 4044 bp, Homo sapiens
gtggattagcgagctcggtaatccggtctcctaaatgaacaaaaaagtagacgctttttgaggttgagcatatttcgattaaatcttggcttaggccctagatcaagggtttagatcagaataaaatgaaaattagtgttgcacgtacgcatattgcatcagaatcttgcagtgattgttttagtttcctgagttgcattgatagattcttttaaaatatgactgatttgcataactttagaagcagaatcattttcagtatatatggtgcacattgagggcaaaaagtagttttgttaatgtttaaacttaagttacctacaactttgaactgtatgtagaagttttgtagtttgaagtcaatagtgccataatataccttataaggcgttcttactagatctttgttatatttacctttttctctccctatggggtgatgtaggatagtgcttgaaatttgcacttcagtagcatttaatgttcagtgctcttgtcataaacatagaatggatattgagtagtttctgatcccagatggtaatgtgtaggttcaagggtattgtgtgtagcaagtgaagattgcagaaataaaacttcagttcatgcttgaaatttaagtattgttgtgatgccagaattgctgctcaccgtttttaggtttcaggtcctctgacaccttttggtatcgttaattttactgatttgtgtagaatgtcagttgtattttaccagctaatatctagaaatgctggcaagaggggtttactccagctttagattgtaggtatgttagcttttttcatacagtgtattaaatttactgagtcagcttgctgaataagacagaagcccaagaattttaacagtgtgtagctttagttgtctaaaagttaggccttcgggcttcaaaagttagtggtcatcgaaaagcattaatctttgcagtttcaggtacaacacattggttttgattagggatggggatggggccctctttttgcagaatggggaaagtattgacaggaattgagagctattggtaggccagtgtataaggtatgtgaaaacagaattaagttattggtctgaagtgactgaagcatttaggctctatcaaggcctaaaatttggtaatatgagtttggtaatgcgaattgtggcagtggacaatatttagttaaaattatgtaattgcataagtactagcacagtatttttaataaaagttatttcttagcaaatgtcagttgcattttgtctaaaggtagagtgacactacagtgtctatatgtcctgctaaaaattgtggggaatatttttttttaagacagcgtttatatcgggagaggttttattccgttggattatgttagctgcatataaatgtgcacagttaattttgcccaagtttttgttttgaaatgaatgtaaaacttactgaagaagtagcttcccaaaatttagttttctgttaagccaaaaatattattttaaaagagtatttgcaaattttgaagttgacattaattgagaatgttactaaggctaaactggacccgcttgcccagaagataattatggaaaaattcttttgtgacttccaaagcagtctactattagcatgaattactgacagtcatccaaatatataggaacaaaaaattaaatgtttatgtaactttgaaaaaaaagcctttgaagaaaataattgaatgctgtctgggagacagatttctttcagcacttaaagtacataacacactacttttacttttcccacttgattttaaattatcagggttattaagaccttaaaattattttaccaggtttttacatgtgagctgtgacatgactggcattttctttgatttcagcgtatgttggtctctacacatgaaatttgtgtgacttaaaactttctctaaaactgtacttttagttatgatatgcatagaaagcagtatcaaatattgcgtcaaatgactaataacacttaatttctagagttgtggttttattgagccaaaagttgatatgaaaaaaagtcagtaaggaaagtcagtgaagtgcttgcttttttgataattgcactcccaataattttgatattccaacgtacttggtttgcttgttttcacgttaatgttttctgtttattggagtgggaaggcattaaaattgtcattgaagactttgtctttgacatgttgtagtatttatttcagtaactaacctgtgaaaagttaaattcctttatgaaagtagtgattggagtatttttatctgataaagaaagattaataatgaagccatttctccgaggaaaattgaggacaataattcagttttaaaatattatcgcaaaattaaattattctaaaaatttgttagtagggttatatgcttaatattagtctgaaatatagtgctgaatttgagactatagaaaaattaagtgtatttagggtatgtggaaacgttaggcttctgttgtatttttattgtttggtagatttgcctcttttcaaataaatgttcacagggaatacttttaacttgtagagagtacagtgactattgaagttacctaaattacctcaaggtaagtgattactgaaattaatcatgagggttttaaaaagtattctattcacaacatttattttacattgttttgtatctgctaagttatatttcctgaaaaacatgactggaccacctaattgctgtatgataacttacaaacttcatttttcatagtgcttattcaagtgtaaagcacaactgaaaggagtaatgtacagtttatatgaggaaaaaggaattttattgctgccagtgtaaaagtttgcacagcagtatagtcatcaatgcagatttacattgcttataatatactaagtaaatactaaatgattaaagataataaaatatggtgaggtataaccaccttcattttaaacttagttttagaagatagtaaagaaagattcctttattacctttttagaattttatttttaataacatgggaaaggcaactggtgatattttaatttttgtatggaacagtgcatctgctttctcatagccacataaaatacataaacttcttagtgttatgaaatggcttactttttggaagtgaagaagtcttcaattcttattttctaatgttattttgaaatttgcctccatttgctgtttgttcatttggtgatagcgcaacacttaaaaaaatattttaagccgcttctgaagtaatcacttcagtgacttttaatggaggagtatttgttatgggaaattcacttcacaaagttttaacattaattcacttgaagtaaacgtgctatttttaaattttcatctcaatcttttaagtaagacgaaagcttaggaaatcacttttattattgatattgtgtgtgacttcagagtttgtaaagagaattgtagaagtgttgcatgcatatgacaattttctgcttaattgaaatgtgaggcctctgccatactacaaggatttagcttccagaaaatgtaatattaacatagcttaagaaatgtatttttttttttctgtagaaaccgttgggttaaacaaacagttcagaagttttattacatggaacccattagttcttaatcttgttacctttttcttcattttttctgttaaacttgattttcacagtcagcattgaagaattcatcttgtggcctgaattcattaagaaaagatgttaggatttgttctgaagatagtgacttaggaaatttgtgagactggggtcagtcagttctgttttacaattgctttctatttggtagctttgaaattaatttagttgcttatcagagagaataatgttgaggttagactaaccttaaattggtaaggctttgctgagcaaactgataactgtaagtcttttatagggtgcattactgccacatatacgttcttccataggtggttaaaagtatattggtctgtgtttggtgattctctttgtacatattgagtatatgcat

SEQ ID NO: 876 - DNA, 4051 bp, Homo sapiens
gaaaattagtgttgcacgtacgcatattgcatcagaatcttgcagtgattgttttagtttcctgagttgcattgatagattcttttaaaatatgactgatttgcataactttagaagcagaatcattttcagtatatatggtgcacattgagggcaaaaagtagttttgttaatgtttaaacttaagttacctacaactttgaactgtatgtagaagttttgtagtttgaagtcaatagtgccataatataccttataaggcgttcttactagatctttgttatatttacctttttctctccctatggggtgatgtaggatagtgcttgaaatttgcacttcagtagcatttaatgttcagtgctcttgtcataaacatagaatggatattgagtagtttctgatcccagatggtaatgtgtaggttcaagggtattgtgtgtagcaagtgaagattgcagaaataaaacttcagttcatgcttgaaatttaagtattgttgtgatgccagaattgctgctcaccgtttttaggtttcaggtcctctgacaccttttggtatcgttaattttactgatttgtgtagaatgtcagttgtattttaccagctaatatctagaaatgctggcaagaggggtttactccagctttagattgtaggtatgttagcttttttcatacagtgtattaaatttactgagtcagcttgctgaataagacagaagcccaagaattttaacagtgtgtagctttagttgtctaaaagttaggccttcgggcttcaaaagttagtggtcatcgaaaagcattaatctttgcagtttcaggtacaacacattggttttgattagggatggggatggggccctctttttgcagaatggggaaagtattgacaggaattgagagctattggtaggccagtgtataaggtatgtgaaaacagaattaagttattggtctgaagtgactgaagcatttaggctctatcaaggcctaaaatttggtaatatgagtttggtaatgcgaattgtggcagtggacaatatttagttaaaattatgtaattgcataagtactagcacagtatttttaataaaagttatttcttagcaaatgtcagttgcattttgtctaaaggtagagtgacactacagtgtctatatgtcctgctaaaaattgtggggaatatttttttttaagacagcgtttatatcgggagaggttttattccgttggattatgttagctgcatataaatgtgcacagttaattttgcccaagtttttgttttgaaatgaatgtaaaacttactgaagaagtagcttcccaaaatttagttttctgttaagccaaaaatattattttaaaagagtatttgcaaattttgaagttgacattaattgagaatgttactaaggctaaactggacccgcttgcccagaagataattatggaaaaattcttttgtgacttccaaagcagtctactattagcatgaattactgacagtcatccaaatatataggaacaaaaaattaaatgtttatgtaactttgaaaaaaaagcctttgaagaaaataattgaatgctgtctgggagacagatttctttcagcacttaaagtacataacacactacttttacttttcccacttgattttaaattatcagggttattaagaccttaaaattattttaccaggtttttacatgtgagctgtgacatgactggcattttctttgatttcagcgtatgttggtctctacacatgaaatttgtgtgacttaaaactttctctaaaactgtacttttagttatgatatgcatagaaagcagtatcaaatattgcgtcaaatgactaataacacttaatttctagagttgtggttttattgagccaaaagttgatatgaaaaaaagtcagtaaggaaagtcagtgaagtgcttgcttttttgataattgcactcccaataattttgatattccaacgtacttggtttgcttgttttcacgttaatgttttctgtttattggagtgggaaggcattaaaattgtcattgaagactttgtctttgacatgttgtagtatttatttcagtaactaacctgtgaaaagttaaattcctttatgaaagtagtgattggagtatttttatctgataaagaaagattaataatgaagccatttctccgaggaaaattgaggacaataattcagttttaaaatattatcgcaaaattaaattattctaaaaatttgttagtagggttatatgcttaatattagtctgaaatatagtgctgaatttgagactatagaaaaattaagtgtatttagggtatgtggaaacgttaggcttctgttgtatttttattgtttggtagatttgcctcttttcaaataaatgttcacagggaatacttttaacttgtagagagtacagtgactattgaagttacctaaattacctcaaggtaagtgattactgaaattaatcatgagggttttaaaaagtattctattcacaacatttattttacattgttttgtatctgctaagttatatttcctgaaaaacatgactggaccacctaattgctgtatgataacttacaaacttcatttttcatagtgcttattcaagtgtaaagcacaactgaaaggagtaatgtacagtttatatgaggaaaaaggaattttattgctgccagtgtaaaagtttgcacagcagtatagtcatcaatgcagatttacattgcttataatatactaagtaaatactaaatgattaaagataataaaatatggtgaggtataaccaccttcattttaaacttagttttagaagatagtaaagaaagattcctttattacctttttagaattttatttttaataacatgggaaaggcaactggtgatattttaatttttgtatggaacagtgcatctgctttctcatagccacataaaatacataaacttcttagtgttatgaaatggcttactttttggaagtgaagaagtcttcaattcttattttctaatgttattttgaaatttgcctccatttgctgtttgttcatttggtgatagcgcaacacttaaaaaaatattttaagccgcttctgaagtaatcacttcagtgacttttaatggaggagtatttgttatgggaaattcacttcacaaagttttaacattaattcacttgaagtaaacgtgctatttttaaattttcatctcaatcttttaagtaagacgaaagcttaggaaatcacttttattattgatattgtgtgtgacttcagagtttgtaaagagaattgtagaagtgttgcatgcatatgacaattttctgcttaattgaaatgtgaggcctctgccatactacaaggatttagcttccagaaaatgtaatattaacatagcttaagaaatgtatttttttttttctgtagaaaccgttgggttaaacaaacagttcagaagttttattacatggaacccattagttcttaatcttgttacctttttcttcattttttctgttaaacttgattttcacagtcagcattgaagaattcatcttgtggcctgaattcattaagaaaagatgttaggatttgttctgaagatagtgacttaggaaatttgtgagactggggtcagtcagttctgttttacaattgctttctatttggtagctttgaaattaatttagttgcttatcagagagaataatgttgaggttagactaaccttaaattggtaaggctttgctgagcaaactgataactgtaagtcttttatagggtgcattactgccacatatacgttcttccataggtggttaaaagtatattggtctgtgtttggtgattctctttgtacatattgagtatatgcattcactaatgtaaaataatttgccaagaaaggtgaaattagtatattgtacttgactattcacctttcccttagttttttgaatttttttcattggttgcagaggaagtattagcaatttaattcttttaaaata

SEQ ID NO: 877 - DNA, 4036 bp, Homo sapiens
gggcaaaaagtagttttgttaatgtttaaacttaagttacctacaactttgaactgtatgtagaagttttgtagtttgaagtcaatagtgccataatataccttataaggcgttcttactagatctttgttatatttacctttttctctccctatggggtgatgtaggatagtgcttgaaatttgcacttcagtagcatttaatgttcagtgctcttgtcataaacatagaatggatattgagtagtttctgatcccagatggtaatgtgtaggttcaagggtattgtgtgtagcaagtgaagattgcagaaataaaacttcagttcatgcttgaaatttaagtattgttgtgatgccagaattgctgctcaccgtttttaggtttcaggtcctctgacaccttttggtatcgttaattttactgatttgtgtagaatgtcagttgtattttaccagctaatatctagaaatgctggcaagaggggtttactccagctttagattgtaggtatgttagcttttttcatacagtgtattaaatttactgagtcagcttgctgaataagacagaagcccaagaattttaacagtgtgtagctttagttgtctaaaagttaggccttcgggcttcaaaagttagtggtcatcgaaaagcattaatctttgcagtttcaggtacaacacattggttttgattagggatggggatggggccctctttttgcagaatggggaaagtattgacaggaattgagagctattggtaggccagtgtataaggtatgtgaaaacagaattaagttattggtctgaagtgactgaagcatttaggctctatcaaggcctaaaatttggtaatatgagtttggtaatgcgaattgtggcagtggacaatatttagttaaaattatgtaattgcataagtactagcacagtatttttaataaaagttatttcttagcaaatgtcagttgcattttgtctaaaggtagagtgacactacagtgtctatatgtcctgctaaaaattgtggggaatatttttttttaagacagcgtttatatcgggagaggttttattccgttggattatgttagctgcatataaatgtgcacagttaattttgcccaagtttttgttttgaaatgaatgtaaaacttactgaagaagtagcttcccaaaatttagttttctgttaagccaaaaatattattttaaaagagtatttgcaaattttgaagttgacattaattgagaatgttactaaggctaaactggacccgcttgcccagaagataattatggaaaaattcttttgtgacttccaaagcagtctactattagcatgaattactgacagtcatccaaatatataggaacaaaaaattaaatgtttatgtaactttgaaaaaaaagcctttgaagaaaataattgaatgctgtctgggagacagatttctttcagcacttaaagtacataacacactacttttacttttcccacttgattttaaattatcagggttattaagaccttaaaattattttaccaggtttttacatgtgagctgtgacatgactggcattttctttgatttcagcgtatgttggtctctacacatgaaatttgtgtgacttaaaactttctctaaaactgtacttttagttatgatatgcatagaaagcagtatcaaatattgcgtcaaatgactaataacacttaatttctagagttgtggttttattgagccaaaagttgatatgaaaaaaagtcagtaaggaaagtcagtgaagtgcttgcttttttgataattgcactcccaataattttgatattccaacgtacttggtttgcttgttttcacgttaatgttttctgtttattggagtgggaaggcattaaaattgtcattgaagactttgtctttgacatgttgtagtatttatttcagtaactaacctgtgaaaagttaaattcctttatgaaagtagtgattggagtatttttatctgataaagaaagattaataatgaagccatttctccgaggaaaattgaggacaataattcagttttaaaatattatcgcaaaattaaattattctaaaaatttgttagtagggttatatgcttaatattagtctgaaatatagtgctgaatttgagactatagaaaaattaagtgtatttagggtatgtggaaacgttaggcttctgttgtatttttattgtttggtagatttgcctcttttcaaataaatgttcacagggaatacttttaacttgtagagagtacagtgactattgaagttacctaaattacctcaaggtaagtgattactgaaattaatcatgagggttttaaaaagtattctattcacaacatttattttacattgttttgtatctgctaagttatatttcctgaaaaacatgactggaccacctaattgctgtatgataacttacaaacttcatttttcatagtgcttattcaagtgtaaagcacaactgaaaggagtaatgtacagtttatatgaggaaaaaggaattttattgctgccagtgtaaaagtttgcacagcagtatagtcatcaatgcagatttacattgcttataatatactaagtaaatactaaatgattaaagataataaaatatggtgaggtataaccaccttcattttaaacttagttttagaagatagtaaagaaagattcctttattacctttttagaattttatttttaataacatgggaaaggcaactggtgatattttaatttttgtatggaacagtgcatctgctttctcatagccacataaaatacataaacttcttagtgttatgaaatggcttactttttggaagtgaagaagtcttcaattcttattttctaatgttattttgaaatttgcctccatttgctgtttgttcatttggtgatagcgcaacacttaaaaaaatattttaagccgcttctgaagtaatcacttcagtgacttttaatggaggagtatttgttatgggaaattcacttcacaaagttttaacattaattcacttgaagtaaacgtgctatttttaaattttcatctcaatcttttaagtaagacgaaagcttaggaaatcacttttattattgatattgtgtgtgacttcagagtttgtaaagagaattgtagaagtgttgcatgcatatgacaattttctgcttaattgaaatgtgaggcctctgccatactacaaggatttagcttccagaaaatgtaatattaacatagcttaagaaatgtatttttttttttctgtagaaaccgttgggttaaacaaacagttcagaagttttattacatggaacccattagttcttaatcttgttacctttttcttcattttttctgttaaacttgattttcacagtcagcattgaagaattcatcttgtggcctgaattcattaagaaaagatgttaggatttgttctgaagatagtgacttaggaaatttgtgagactggggtcagtcagttctgttttacaattgctttctatttggtagctttgaaattaatttagttgcttatcagagagaataatgttgaggttagactaaccttaaattggtaaggctttgctgagcaaactgataactgtaagtcttttatagggtgcattactgccacatatacgttcttccataggtggttaaaagtatattggtctgtgtttggtgattctctttgtacatattgagtatatgcattcactaatgtaaaataatttgccaagaaaggtgaaattagtatattgtacttgactattcacctttcccttagttttttgaatttttttcattggttgcagaggaagtattagcaatttaattcttttaaaataatttgcactggaataaataagtatcggcaaatataagaagagtaacataatttaagggtgaattaattttatttgggaagttttagttctgtatagttaaggcagattcttcatttgcaacagttgacattgggac

SEQ ID NO: 878 - DNA, 4044 bp, Homo sapiens
tgatcccagatggtaatgtgtaggttcaagggtattgtgtgtagcaagtgaagattgcagaaataaaacttcagttcatgcttgaaatttaagtattgttgtgatgccagaattgctgctcaccgtttttaggtttcaggtcctctgacaccttttggtatcgttaattttactgatttgtgtagaatgtcagttgtattttaccagctaatatctagaaatgctggcaagaggggtttactccagctttagattgtaggtatgttagcttttttcatacagtgtattaaatttactgagtcagcttgctgaataagacagaagcccaagaattttaacagtgtgtagctttagttgtctaaaagttaggccttcgggcttcaaaagttagtggtcatcgaaaagcattaatctttgcagtttcaggtacaacacattggttttgattagggatggggatggggccctctttttgcagaatggggaaagtattgacaggaattgagagctattggtaggccagtgtataaggtatgtgaaaacagaattaagttattggtctgaagtgactgaagcatttaggctctatcaaggcctaaaatttggtaatatgagtttggtaatgcgaattgtggcagtggacaatatttagttaaaattatgtaattgcataagtactagcacagtatttttaataaaagttatttcttagcaaatgtcagttgcattttgtctaaaggtagagtgacactacagtgtctatatgtcctgctaaaaattgtggggaatatttttttttaagacagcgtttatatcgggagaggttttattccgttggattatgttagctgcatataaatgtgcacagttaattttgcccaagtttttgttttgaaatgaatgtaaaacttactgaagaagtagcttcccaaaatttagttttctgttaagccaaaaatattattttaaaagagtatttgcaaattttgaagttgacattaattgagaatgttactaaggctaaactggacccgcttgcccagaagataattatggaaaaattcttttgtgacttccaaagcagtctactattagcatgaattactgacagtcatccaaatatataggaacaaaaaattaaatgtttatgtaactttgaaaaaaaagcctttgaagaaaataattgaatgctgtctgggagacagatttctttcagcacttaaagtacataacacactacttttacttttcccacttgattttaaattatcagggttattaagaccttaaaattattttaccaggtttttacatgtgagctgtgacatgactggcattttctttgatttcagcgtatgttggtctctacacatgaaatttgtgtgacttaaaactttctctaaaactgtacttttagttatgatatgcatagaaagcagtatcaaatattgcgtcaaatgactaataacacttaatttctagagttgtggttttattgagccaaaagttgatatgaaaaaaagtcagtaaggaaagtcagtgaagtgcttgcttttttgataattgcactcccaataattttgatattccaacgtacttggtttgcttgttttcacgttaatgttttctgtttattggagtgggaaggcattaaaattgtcattgaagactttgtctttgacatgttgtagtatttatttcagtaactaacctgtgaaaagttaaattcctttatgaaagtagtgattggagtatttttatctgataaagaaagattaataatgaagccatttctccgaggaaaattgaggacaataattcagttttaaaatattatcgcaaaattaaattattctaaaaatttgttagtagggttatatgcttaatattagtctgaaatatagtgctgaatttgagactatagaaaaattaagtgtatttagggtatgtggaaacgttaggcttctgttgtatttttattgtttggtagatttgcctcttttcaaataaatgttcacagggaatacttttaacttgtagagagtacagtgactattgaagttacctaaattacctcaaggtaagtgattactgaaattaatcatgagggttttaaaaagtattctattcacaacatttattttacattgttttgtatctgctaagttatatttcctgaaaaacatgactggaccacctaattgctgtatgataacttacaaacttcatttttcatagtgcttattcaagtgtaaagcacaactgaaaggagtaatgtacagtttatatgaggaaaaaggaattttattgctgccagtgtaaaagtttgcacagcagtatagtcatcaatgcagatttacattgcttataatatactaagtaaatactaaatgattaaagataataaaatatggtgaggtataaccaccttcattttaaacttagttttagaagatagtaaagaaagattcctttattacctttttagaattttatttttaataacatgggaaaggcaactggtgatattttaatttttgtatggaacagtgcatctgctttctcatagccacataaaatacataaacttcttagtgttatgaaatggcttactttttggaagtgaagaagtcttcaattcttattttctaatgttattttgaaatttgcctccatttgctgtttgttcatttggtgatagcgcaacacttaaaaaaatattttaagccgcttctgaagtaatcacttcagtgacttttaatggaggagtatttgttatgggaaattcacttcacaaagttttaacattaattcacttgaagtaaacgtgctatttttaaattttcatctcaatcttttaagtaagacgaaagcttaggaaatcacttttattattgatattgtgtgtgacttcagagtttgtaaagagaattgtagaagtgttgcatgcatatgacaattttctgcttaattgaaatgtgaggcctctgccatactacaaggatttagcttccagaaaatgtaatattaacatagcttaagaaatgtatttttttttttctgtagaaaccgttgggttaaacaaacagttcagaagttttattacatggaacccattagttcttaatcttgttacctttttcttcattttttctgttaaacttgattttcacagtcagcattgaagaattcatcttgtggcctgaattcattaagaaaagatgttaggatttgttctgaagatagtgacttaggaaatttgtgagactggggtcagtcagttctgttttacaattgctttctatttggtagctttgaaattaatttagttgcttatcagagagaataatgttgaggttagactaaccttaaattggtaaggctttgctgagcaaactgataactgtaagtcttttatagggtgcattactgccacatatacgttcttccataggtggttaaaagtatattggtctgtgtttggtgattctctttgtacatattgagtatatgcattcactaatgtaaaataatttgccaagaaaggtgaaattagtatattgtacttgactattcacctttcccttagttttttgaatttttttcattggttgcagaggaagtattagcaatttaattcttttaaaataatttgcactggaataaataagtatcggcaaatataagaagagtaacataatttaagggtgaattaattttatttgggaagttttagttctgtatagttaaggcagattcttcatttgcaacagttgacattgggacatgtgtgaacatcttcaaggtattaggacatcttcaaggcattactttttggcagtgttgagaatttttttttttttttttttttttttgagatggaatctcgctctatcgcccagtctggggtgcagtggcaggatctcggctcactggaacctctgcctcccaggttcaggcgattctcctgcctgaacctcccaagcagctgggattataggtgcatgccaccacgcccagatagtttttgtacttttagtagag

SEQ ID NO: 879 - DNA, 4049 bp, Homo sapiens
tgacttccaaagcagtctactattagcatgaattactgacagtcatccaaatatataggaacaaaaaattaaatgtttatgtaactttgaaaaaaaagcctttgaagaaaataattgaatgctgtctgggagacagatttctttcagcacttaaagtacataacacactacttttacttttcccacttgattttaaattatcagggttattaagaccttaaaattattttaccaggtttttacatgtgagctgtgacatgactggcattttctttgatttcagcgtatgttggtctctacacatgaaatttgtgtgacttaaaactttctctaaaactgtacttttagttatgatatgcatagaaagcagtatcaaatattgcgtcaaatgactaataacacttaatttctagagttgtggttttattgagccaaaagttgatatgaaaaaaagtcagtaaggaaagtcagtgaagtgcttgcttttttgataattgcactcccaataattttgatattccaacgtacttggtttgcttgttttcacgttaatgttttctgtttattggagtgggaaggcattaaaattgtcattgaagactttgtctttgacatgttgtagtatttatttcagtaactaacctgtgaaaagttaaattcctttatgaaagtagtgattggagtatttttatctgataaagaaagattaataatgaagccatttctccgaggaaaattgaggacaataattcagttttaaaatattatcgcaaaattaaattattctaaaaatttgttagtagggttatatgcttaatattagtctgaaatatagtgctgaatttgagactatagaaaaattaagtgtatttagggtatgtggaaacgttaggcttctgttgtatttttattgtttggtagatttgcctcttttcaaataaatgttcacagggaatacttttaacttgtagagagtacagtgactattgaagttacctaaattacctcaaggtaagtgattactgaaattaatcatgagggttttaaaaagtattctattcacaacatttattttacattgttttgtatctgctaagttatatttcctgaaaaacatgactggaccacctaattgctgtatgataacttacaaacttcatttttcatagtgcttattcaagtgtaaagcacaactgaaaggagtaatgtacagtttatatgaggaaaaaggaattttattgctgccagtgtaaaagtttgcacagcagtatagtcatcaatgcagatttacattgcttataatatactaagtaaatactaaatgattaaagataataaaatatggtgaggtataaccaccttcattttaaacttagttttagaagatagtaaagaaagattcctttattacctttttagaattttatttttaataacatgggaaaggcaactggtgatattttaatttttgtatggaacagtgcatctgctttctcatagccacataaaatacataaacttcttagtgttatgaaatggcttactttttggaagtgaagaagtcttcaattcttattttctaatgttattttgaaatttgcctccatttgctgtttgttcatttggtgatagcgcaacacttaaaaaaatattttaagccgcttctgaagtaatcacttcagtgacttttaatggaggagtatttgttatgggaaattcacttcacaaagttttaacattaattcacttgaagtaaacgtgctatttttaaattttcatctcaatcttttaagtaagacgaaagcttaggaaatcacttttattattgatattgtgtgtgacttcagagtttgtaaagagaattgtagaagtgttgcatgcatatgacaattttctgcttaattgaaatgtgaggcctctgccatactacaaggatttagcttccagaaaatgtaatattaacatagcttaagaaatgtatttttttttttctgtagaaaccgttgggttaaacaaacagttcagaagttttattacatggaacccattagttcttaatcttgttacctttttcttcattttttctgttaaacttgattttcacagtcagcattgaagaattcatcttgtggcctgaattcattaagaaaagatgttaggatttgttctgaagatagtgacttaggaaatttgtgagactggggtcagtcagttctgttttacaattgctttctatttggtagctttgaaattaatttagttgcttatcagagagaataatgttgaggttagactaaccttaaattggtaaggctttgctgagcaaactgataactgtaagtcttttatagggtgcattactgccacatatacgttcttccataggtggttaaaagtatattggtctgtgtttggtgattctctttgtacatattgagtatatgcattcactaatgtaaaataatttgccaagaaaggtgaaattagtatattgtacttgactattcacctttcccttagttttttgaatttttttcattggttgcagaggaagtattagcaatttaattcttttaaaataatttgcactggaataaataagtatcggcaaatataagaagagtaacataatttaagggtgaattaattttatttgggaagttttagttctgtatagttaaggcagattcttcatttgcaacagttgacattgggacatgtgtgaacatcttcaaggtattaggacatcttcaaggcattactttttggcagtgttgagaatttttttttttttttttttttttttgagatggaatctcgctctatcgcccagtctggggtgcagtggcaggatctcggctcactggaacctctgcctcccaggttcaggcgattctcctgcctgaacctcccaagcagctgggattataggtgcatgccaccacgcccagatagtttttgtacttttagtagagatggggttttaccaccttggccaggctggtctcaaactccagacctcaagtgatccgcctgcctcggcctcccaaaatgctgggattacaggcgtgagccactgcgcctggccagtgttgagaatattgagagatggatattgtagctgtacctgccatcaaaagaattttcttgacctccacatagtgtgaaaaagaagactgtttacacattatattttaagtaattatacacataattattatcagtactcaccacttcaaatatgaacagtgaatctaaccagtgtttgatttctctgtgtgtgtatgtgtatacaaagttagcaaaccttttatcttaatatttattaaaaaacgaatttttgtttctttaaagaaaagactaccttagagaatattgttctatagtttttaaatatggtcagatctattttaaattatgttaaaattttgagtattacgtttatctatacttttaagcatatatacattgtttcattttagattttagggaggcagtgtgggctctggagccagactgcttgttttgtaatcctggatcttccatttagtagctggatgactttgagtaggttatttagattttctcaatctattttatctgtaaaatggggatgataatggaacctaccgcatacgtttatcttgaatagtaagtgagataataataagtaatttcatttagcatagtacctgccacattgtaaatacttaaatggtagctactgctctgaaaaactgtaatttcaggttatgtatgtagggaaattatttgtattttcatttatggtgtatgattgtaactgaatttcctcagtttgggccatgttaggattttgtttcaagttataagtgtttttaaaaataagggtattcctttaggaagtctgggtatgacatgtctgtgattttgctggttcatcacaaatgggaaataaatctctgctaactcaaactgttgaccaaagtaaaattaattatgccaatcaaaaactatttgctttaaaatataaaaggcaaaaacttcctattagcataatgaagtagaat

SEQ ID NO: 880 - DNA, 4038 bp, Homo sapiens
ttgacattgggacatgtgtgaacatcttcaaggtattaggacatcttcaaggcattactttttggcagtgttgagaatttttttttttttttttttttttttgagatggaatctcgctctatcgcccagtctggggtgcagtggcaggatctcggctcactggaacctctgcctcccaggttcaggcgattctcctgcctgaacctcccaagcagctgggattataggtgcatgccaccacgcccagatagtttttgtacttttagtagagatggggttttaccaccttggccaggctggtctcaaactccagacctcaagtgatccgcctgcctcggcctcccaaaatgctgggattacaggcgtgagccactgcgcctggccagtgttgagaatattgagagatggatattgtagctgtacctgccatcaaaagaattttcttgacctccacatagtgtgaaaaagaagactgtttacacattatattttaagtaattatacacataattattatcagtactcaccacttcaaatatgaacagtgaatctaaccagtgtttgatttctctgtgtgtgtatgtgtatacaaagttagcaaaccttttatcttaatatttattaaaaaacgaatttttgtttctttaaagaaaagactaccttagagaatattgttctatagtttttaaatatggtcagatctattttaaattatgttaaaattttgagtattacgtttatctatacttttaagcatatatacattgtttcattttagattttagggaggcagtgtgggctctggagccagactgcttgttttgtaatcctggatcttccatttagtagctggatgactttgagtaggttatttagattttctcaatctattttatctgtaaaatggggatgataatggaacctaccgcatacgtttatcttgaatagtaagtgagataataataagtaatttcatttagcatagtacctgccacattgtaaatacttaaatggtagctactgctctgaaaaactgtaatttcaggttatgtatgtagggaaattatttgtattttcatttatggtgtatgattgtaactgaatttcctcagtttgggccatgttaggattttgtttcaagttataagtgtttttaaaaataagggtattcctttaggaagtctgggtatgacatgtctgtgattttgctggttcatcacaaatgggaaataaatctctgctaactcaaactgttgaccaaagtaaaattaattatgccaatcaaaaactatttgctttaaaatataaaaggcaaaaacttcctattagcataatgaagtagaatttttaaactttgttataatcttaaattttctttagtgttgaagataggtcaacttaactatcatacatttttattcacataaagtaaactctgcctcaaatgtaataaacttaatatgagttatgtaaactttggtcaatagaggtatattttttagcatttccttttgaaaatttcagccttttgagggagtcttgcaactgaatgtcaagttacatttattacaataaaatggacacttaatataatctgtaatgcattaacataatatgggaacttttaaagtattcagtctctgtattattgagtcctatttccacatttggccaggattctcaatatgatttaggcccaagacgtgggaagaaagaagtaaagaactaaaggatttttttcttcatttttttaattgaatatggggaaagatggaataagcttatctgtccagtaaaggccattatgtgtacatagggattattatttttcccccccttgggctgtactgatttcccagatgtaccacagcactcttagtagtgaagcacttgacttctagtgagtggattttttgtgtgtgtgttttatattgcagagtgaatacactctgtctgatactatgtgactttctgattatgtgatttttatgcattttatgtgttttgtaaactagctgtatttttggtccatgtctaggttgtagaattgaattgtgcattttggcatctgagcacagctgagttttctaaatcaatctctctccttgcacctagtttttgctttagatcactacctaagacttactgttgatttaatattagagcacttaagcatagctttgacttttatttcctttgatttttgtagattttcaggctgaagtacaataaggttctctgttctttactagtaattgcaaagattgtattctgtgaattttatttgtttaatacttttgatcttttgaagaggatgtaattatttaaggtattatgaaatgcattgtgatttgaattagatactctttggagatggagttttgctgttgttgcccaggctggagtgcaatggtgtgatctcggctcaccacagcctccgcctcctgggttcaagcaattctcttgccgcagcctcccaagtagctggaattacaggcatgcgccaccacgcccggctaattttatattttttttttcagtagagatggggggtttctccatgttggtcaggctggcctcgaactcttgacctcaggtaatctgcctgtctcagcctgctaaagtgctgagattacaggcatgagccactgcgcccggcctcagatactcttttaattagatgcgtttaaaaatttaacccaccattgctggcatgaatagatgtatttttagagtgattcataaatatcgtatacatgtttaaagttacaaactttttgcttatttcaaaatgcaggattcttttccatttaaaattccctctctttgtgagacttctttttgagtattctggttactctaaactgattggagatgaaattagatagaattgaaaactgtacttttaaaatgaaattttggggatgtcattaagcttgattttttaggttttttttttagtgtgtattataaattattttacactgattgtcagcgataaaatggaatgcctgggattttttaaaatttattttattcatttttataaggtaaaaacagtgttttgctaggcttaatttgaccatgttgtaaaatttattgtataccttgaaagaatcatttatgaaagatactgaattagctaatatatactctgtcttatgtagtttttgattaacaatacactttttaaatcattagctcatttgattttgcaaagaagaacaggtaacctaagaggcagacagaacaggcattacttttatttttctttcttttttattttatttatttatttatttatttattttttgcagcttaggaattgtagctccagtggaatcagtatcttgttaatggctagtgaaagactgagtctgaagaaggatgcaggacttttttggcacttggtgcagtatttttcccattatgttacatgagtggttcttaaacttcagtgtgttagaacaacctgaagggcttattaagctatggattgcttactccaccctcagagtttctgattcagtaggtctggattgggacctgagaatttttatttcttagaagttttcaagtgatgctgatgctggtgctctggggatcacactttgaggaccaccaatgaacattatctcccaccaagcaaacccttaacatgttatactcctttaggttattagaatttatacatgcattatttcatttgacctgtaaactctaagtaactttgcatggaaaatgttatcctgattttatagacgagatagtgagtttagaaaggcagtatggtggaatggagcatagatttggagttggctagacctaaagtccagattaaatctctgctcaaggctgggcgtggtggctcatgcctgtaatcccagtgctttgggaggccagcgttggcagattgcttgagtctggaagttcgagaccagtctgggcaacataggcagaccctgtctctacaaaaaaaaatacaaaaattagtcgggtgttatagtgcgcattggtagtcccagctactgaggaggc

SEQ ID NO: 881 - DNA, 4063 bp, Homo sapiens
ggagatgaaattagatagaattgaaaactgtacttttaaaatgaaattttggggatgtcattaagcttgattttttaggttttttttttagtgtgtattataaattattttacactgattgtcagcgataaaatggaatgcctgggattttttaaaatttattttattcatttttataaggtaaaaacagtgttttgctaggcttaatttgaccatgttgtaaaatttattgtataccttgaaagaatcatttatgaaagatactgaattagctaatatatactctgtcttatgtagtttttgattaacaatacactttttaaatcattagctcatttgattttgcaaagaagaacaggtaacctaagaggcagacagaacaggcattacttttatttttctttcttttttattttatttatttatttatttatttattttttgcagcttaggaattgtagctccagtggaatcagtatcttgttaatggctagtgaaagactgagtctgaagaaggatgcaggacttttttggcacttggtgcagtatttttcccattatgttacatgagtggttcttaaacttcagtgtgttagaacaacctgaagggcttattaagctatggattgcttactccaccctcagagtttctgattcagtaggtctggattgggacctgagaatttttatttcttagaagttttcaagtgatgctgatgctggtgctctggggatcacactttgaggaccaccaatgaacattatctcccaccaagcaaacccttaacatgttatactcctttaggttattagaatttatacatgcattatttcatttgacctgtaaactctaagtaactttgcatggaaaatgttatcctgattttatagacgagatagtgagtttagaaaggcagtatggtggaatggagcatagatttggagttggctagacctaaagtccagattaaatctctgctcaaggctgggcgtggtggctcatgcctgtaatcccagtgctttgggaggccagcgttggcagattgcttgagtctggaagttcgagaccagtctgggcaacataggcagaccctgtctctacaaaaaaaaatacaaaaattagtcgggtgttatagtgcgcattggtagtcccagctactgaggaggctgaggtgggatcacctgagactgggactttgaggctgcattgagctgtgattgggacactgtactcctgcctgggtgacagagtgagaccctctctcaaaaataaataaataaatacatccccgctcagccacttatcagttacgtagatacactgcctaaccttagtgaaccctgtttcgacaactccaaaatgggagtaaaaatcctaaacttgtacagtggttttttagttttgttaaaagtacaggtgaggtttttttcagagtattggttgccatctgagagtgatcccctttcacctcctctaggacttttagcattttctggagacattttggtggtcacagctggggtggtagagtgtgctattggctaggggcttgaagccagtgatgctgcttaacatcctatatggcacaagacccctccccatcaacaaagaattatctagcccaaaatgctgtgtaaaatgtctggtatataataagtataatatttgatgaaaatcagtacctttgcccccaggtgtgatatttaagaaggtcaacttactaaatcagtgatggagttagtcctaacatctgggtgttctgactgctgctaggccagtattctttatatgataataagaactttgtccacagaagatatccctaataacaaaaaaggtttatttgaagaggactcatgtgttctttggctgattgtgaaagtgttgctttgaacttctgttagaaaaggttgaagatgttttccgtaagtgtttttaatactgtacgtagtattcagaaggatgtttaattttttttttaattttgctagtagtttttaaagtaatcctttttcctttaattatgtagttgttgaactgttgggagttacttttctcttactattttgttatttaatgtattctttgaccttatgcttttttattctaaagctgcttttattatagtcagatatgatgaagttaaatgtacaatgtaaaattgcaaatttccaacgagctatacaaacttaaatatttctaagtaaagaaaatagggctgactctaaggttctttgatccatgtgttgcattcttttctaggccctaaatttgctatgccagcctgttgaattaaagtgctttatttatctaaattagaaacttgtattaaagtgaagttttagaaaaaaagaaacaaaatcggaatggagttttaggttagcccagagatgggaagatgccaagaaggtagctttagtggattctgaattttttggttttgttttgtttttagggcaggcaaatgtaattacaaaagggttctaggaatagattgctgtgattttttttctgtttgcatgattttacagtttgctttgcctctcacttttgaatgcagaataaaatgtcaaggccttatttttttttaaattcttaagaaatttaagatttgactgttaattccttttgaaatatgggatattttgagataccaattatttaagacaaataggactcattgttacaattcagttgaataaggcttatgatgtttatttcagtatatgaatgaaaactatgtgcttattgtacttaagaaaatttcttttattaaaaacatgactaaagagaattttaaaaatcacccactgtcctacttctctaaaacttaatgttttcatattagcttccagttttgttcatatgcatatactttaaaacctagttcatggtgaacttaagagggtgttctttttaaaaaacaatttccattgcactttgtcgttgccttaattaaatggtgaaatcatcagaaatatttattttcctatacttatacatttattaagcttgtttccatttttttattttgtgattttttaagtggatttaagataacctaaacattagagaggattttcatggttttgattcatgaaatcataatgttatacaaacctaactgaagtgttagagccttgaagatttttcccccgaattacatatagtaactctacttgtatttaatactgaaagcatattttacttatttaagtgagacaaagtaaaatttagctgaatactttagatctatcatttccttttcctgttgtaagaacattacattgtgttgaaattaaagtggatatagaaggtaattagaataaactgccacatcatttttatagtaaagtggtaataacactattgctttctgtttttttaatcagaaggagtatgggcttataatgatgttactgttccctgaagcatattttgaatgatacggtttatatttgcacagttgcccaggtaatcattgtgatattaattgatcaatttgctatttatttgcgttttaaatcagtactagtatttgtgcttaaaaattttgcatatgttttatcagatttaatttttaagtgtcagatactaaaacaaataaccttaactttattaaattataattttttatcatgaggtggtattcatttattcatatagttagaacaaaaaatatttaaaatattgaggtagaaacaaattagtctctttttaattaaaagccagattacttgttagagtaacattttcccaaatgaggtaaaattgttgcgactgttaaacttaaggaaattttgatctaggtgtggtatataccttcttgtggggtgctaatgaaaacagggatggcaaaaatattttgtttgtgagtgtatgcatttatgctttttgacaacctaagaaacactcttacatctgagtatctttcatggactagctgtaggaaatctatataaaatagcttagtatactgaaagtatgacatagttttacatatctagattgtggttgtgattatatataatactataaaatatgctaacgtgctgcttaata

SEQ ID NO: 882 - DNA, 4047 bp, Homo sapiens
aatagcttagtatactgaaagtatgacatagttttacatatctagattgtggttgtgattatatataatactataaaatatgctaacgtgctgcttaataatactatttggattttttttaatactgaaaaggtcacacagattgtgattattgtgtagtgtccaagaactaaggcctaccatctgttactcaaatgtatgaaaaagttaagataatttagtgatataagtggttttgacaccactgtttttggaataatctaattatgatttttataaagactaatatcaaattttaaacgtttgcaaaaatgaaacctaatagttatactgttatttatatttttctattacaatacagatactggctgagaactaaagattgtgtaataaacgcctggccttcagtcatttggttttttttttccctcgattgtttggatagttaactggacatcatgttttaacttgagaaattaagttatacaagattttgatattttaaactagttttcctaactggttgagatatataagaatttagtattacaggactcaatcagggaactgatttaataagaatttcttaaaaatttgtttaaatatttttcaagttcttttcttcatcttctacaacttaattcttgtctgtatgcaaatgagcttccccatttaaaattttgctgttgcattttaggccactatagaagttgtttctttaattttcactcacaagaatttggtcttaccaaattgtgtaaatctttaaaattgtgtatttggcttaatattatagaatctgattgatttaatctaccttgtttcatttagtatgttgacattttcttgagaaatttgttatgccaaatgattaacataataatattttaagtttagatatgattttgaatttacattttcaaatgcaactttgtgtctgtggccttttttttttttttttttttacgagaaacatcttgccaattttcagattaatctgtgaggaaagtagattggtttactagactcagtttgtagactttggtgagaactgaattggaggctatgaaaaaaataccttttgggcctttctgaatagacatatatacataaattatatctcttacattaagtgaggcacatatgtaggtgagatttttacctgaatattaaaagtttaaaagtcgttacctattctgtttacttaatagtatttaaagggtgtgagaggtgttatgtgtttctgtcccttgtttttattcctatccctcccatctaactgttggtactcttatcttcccaggtattaaacttgtatgttttaaaagcttatttacttgttgaaatggttaacttaattagttttttctttgaagtttcagcctaaatattttctgtttttttatatgtcctttaaatatgaaaattctacagctaatcataattagtaattgtactttttcccctattacaataactggtttcataataaaatggtatcccttcaataacaagcatttatagtagtttattaaaactaagggtgttatctattcaaaccaagcaatgcagacttactgttgactctgttaatatattttaaaattgcatattactaaaatttaaaatatgattttgactagtattttggtgtatgttattttagatattttgattatgcactacttaagaatgaattgtcaagtatgattataaagttgatataatagttaaccttcagtgggaataggaatcatttaatattgttagatatttgtattattagaacaatctcctatgattcttactaatatagtaatgaatgacagacaatatgttggctttcatatttaaaaattcacatgcatttctagtttatgtttttcttcgactaaaattctgcagcacttaggcaaagctatttttaccagttggaaaaaaagtaagtcatttccaaccaattttcctggcttgtagtatagaataaagagacttgattttattacattaaagccaaatataaaatgatgcaatctagcacacacttgtttggaacttttctcttttaaatattcagattaagaggacgttgaaaggtaaatttttttttttttttgagacggagtctagctctgtcacccaggctggagtgcactggcacgatttcggcttactgcaagctctgcctcccaggttcatgccattctcctgcctcagcctcccgagtagctgggactacaggcgcctaccacggtggcgcccggctaattttttgtatttttagtagagacggggtttcaccgtgttagccaggatggtctcgatctcctgacctcgtgatctgcctgcctcggcctcccaaagtgctgggattacaggtaaattttgattgttattagcaactataaaagttttgcagttggcttattggaaaaagaaaacctccttgccggagacggagacgcatttgtattagaactttgttttctgagtaccttacctatagtaggtttcaaatattggtgaattagttgatggttaggtctgcataattactgcgtatggaaattctggaaccctattttttcaaaatgcagctaatgttgagagaatatgcactaaatattactagatctttgtttttcaagatgctgatatcccttaacatcttctgcactttacctgtttgaatatcttttttgctgtaaaaattagtggccttatgtctttctgcataattatagagtagccaaaacctgttttaggttaatcacctctggcaaaataaatgataaaagcatagcttttgtaagcagaatgatattacagaagttaacttataaatctaagtgtattaaagacacttaggaaatttatgataatgctgggtcagcattacagttttaactttttacagtttttcatatgctttttttgtgattttgctgtagaaaattaacagttggcatttggcttagttcaagtataatgctgttgacaagtatatctgacacgtcattgaactaataatatttttgaaagctgataggtaagttatatctattttgtttcattcgtcattagtgatcggtcttagatgtttttagcgagagcaaaactgtagaggaatgtgtgtctgtgtgtgtatatgtgtgtgtgtgtgtgtgtattttaacagcaggagagttctgaaacaggaaaccagtcttatcatattcatccagagacctaggaagaaggtaattgtttggtatactcgttaaaaccagttggttgggcaacttaaatttttagaggatcacagatgtaggcttgagcagttgtagatagatgatttctttttttttctttcttttttcttttttttttgagatagagtctctctctgtcatccaggctggagtgcggtggcgcgatcttggcttactgcaacctctgcctcccaggttcaggcgtttctcctgtctcagcctcctgagtagctgggattacaggcgcatgctgccatgcccggctaattttttgtattttagtagagacggggtttcaccgtgttccccaggctggtctcgaactcctgagctcaggcaatctacccacctcggcctcccaaagtgctgggattacaggcgtgagccaccgtgtctggcgatagattatttcataattaacacctgctatgaagaaaaattgattaaaatagttgagaagtctagtacactctcagctaatatactaaattatactatggattttagagtattgttaacattatcagtgacttgatatcttcctgaggttctaatttgcttaactttaaataattggggttcagatcaccttgattgttcccttaaagattaaattttgtaaaactgtgtgtaattttcctgtatctggtttggatagctttaaaaatggttcttaagtttaatgagttcaactgggaaaaaagttagttctattttagatgttgtgtcactggaaattatgtttccctgtttgttatatgcacattattacaaagttgtaatcaatgttttcata

SEQ ID NO: 883 - DNA, 4045 bp, Homo sapiens
agaaaaagatactttgtgatgtaaactattattgtagtgctctataatcattttttggcttaccgtacctaatggacttcagggggatacagttcatttgataagaactgaccttatacattacataatcaggtacttatgtgatatcatttcctggactccataaaatgctggtcaccaggtttaatacctggattccattacagtgtgatttttgtcttatttcatagttggggattaggcttaaaatcctagagtggatttattcagttaaatttattcacactaagatgtagatgactaatactgtatatttttatgtagaccaaattttaaggtaccactgtgcatatgtataccaactacctgaagaagtatttggttggtacaagagatatagaaaggaatcgctgggtgtaccaaggctaatcagttttataattttgcataattttctaactgcgattatcatttagtttagaacaatttatttctcaaggcccatgtaaatattatttttaaaatatacagtcttaagaattcatggcatattttatgaaaggaggaattcatgtctgatgtgcaaatagtcttaacatattttctaatttcagagcaaaaatatatatgtatgaataaattaactgtaaattgtcagtaggaaccttaagaattcgtggcgtattttatgaaaggaattcatgtctgatgtgcaaatagtcttaacatatttgctaatttcagagcaaaaatatatgtgtattaataaatcaactgtaaattgtcagtaagaaccttaatggctttaaaagttaaaatttcaggtcaagcattgtggtgtgctcctgtagtcccagctacttgggaggctgaggtgggaggatcacttggcttgaacccccaggtagagggtagaggccagtctgggtaacacagcgagaacccatctcttaaaaaaaaagtttaagttgtggattatttcctttacactctttcattagtatctttcctggagactttcaatttaaatacttggtgcttatgacaattagatgttaaaatggatgggaaagtactttgtaacttataaagcattatgcagatgtagactccttttataatagttgtgtaagtatataagacaacctacattcttcatgagctagccataagttttagcaacttgctttgaaccacggtagatttacaattttctgtagtattgagttgtgttcatttagaattttgtaatatttatattgaaaatcaaatttttgtacctacaaaaactacaaaaaatccccctagtttttatagtttctattaaaattatagctggtacatagggatgccagaaggactgtttaagaagctgaaaatagagaaatgaatttatcttctcatagttaggcagggcacagtagaaggatgcttaacattgcaagctgatgggaacagcaggttgatatagcttgtgataacacttctaaagaaaaagcaatgagccatagaaaaaagaaaaagatacattttgaattaaggaagatggtgaatctgggaagtgagcagtacagtcaccagacgtgtatcctctcctatggtacagaagtgtttattgggtctctttatggcctgcatgatatatcccacaagatgacctacttcacattattttaattctgtattcaactaagcactaattcaacccagccagattagtactcataccaaaaaagagtgaatactctgaatagagggcaggttttctgattatggtgagaatatctttgtggtaaattaatctggtgtgctagtttttacgttggtctcttctcagtgtcgttagtcactgaggctgattgatcatcttttaggttactgataaagttcctgtacagctgattttcagaccttagattgcaataacttcaccaagaaaatacttcattgggaagcattttggtccttccatttgattcataactcttacctttatgcctctgaaggaaaagatttatacattcagcttgtaattagtaatcaagactgaggtttagtctatctagcttcacaatctatctagtttgttttgtctagccatatgatttcttcaaatatgccatttcttaaaaaaaaatgttttatgtatcccgattaatatttagccagtggttcttttagccgatggatcttgtcacctcttatgatactattaatagcatgtcaacatgaagaattatctgctgaatataatagctatgctgtccttgtttccttttgtctcattcttttttgattgggggataattggccaataaagctttgatagcctctattgcccaggcccctcctcttcttttatgagagaaaggatgaacagtgaccagaaataaaggtattgtttttttctatcaactaaaatggaaataaataattcctaagtaatttgcctgttaggattaaagtctccaagagaatggctgtgcctagtacctaagtgattaatttccttgattggttcacattatattgaggatattagtaatcagtagtgattccttttttggttcaaagatgatagtgtcacagtgaaaaatgtttttaaaatttttgtatacttaatttttctgttaacgaaagtattttcagttggatttttgtttgccctctctattagaatgcccaaagaatatttaaaattttccttttctcttatactgcatatttttcctgtgatttttccccaaacggaaaatactctgcagagattagactttgttattgttgtactacatcattgctttgactaaaataaactcagattgcaaataccttcaagcttacattgctcagtatttttttttttttttttttttgagacggagtctcactcttgtcgcccaggctggagtgcagtggtgccatctcagctcactgcaacctctgcctcctgggttcaagcgattctcctgcctcagcctgcggagcagctgggattatagatgcccgcccccacgcccagctgatttttgtatttgtagtagagatggggttttaccttgttggccagtctggtctcaaactcctgacctcgggtgatccatctgtctcggcctctggaattacaggtgtgagccgccacgcctggctaaattgatcagtattatttaactttgagggatatgatttgttatggaatgcgaagttttatacttgaggtactcagagtccttttgagacaaatatttaacttctccttttgaggttaccgcctacgattgggaattaatgtaaaaaataagccaaaagaaagtgagggaaaagtgaaccaagctgtaatttttttactcttttttattgttgttgttattgttgctgttttttactatcttgattgcaacagtttggcttatatatatagcatttggaattgacagtaagaaagccacatctcatagaagctaactattcccaaattgtttttttcttcttttcctcttactactgctgttttcctcctttcttgctgctaagctcttgtcctgacatgctggtaatatgaaacagtgttttattcagataattgattattctgtaatatgtatgttaatcttttttattacactttaagtaatagggtacatatgcacaacttacagattcgttacatatgtatacatgtgccgtgttggtttgctgcacccattaactcgtcatttacattaggtatttctcctaatgttatccctctcccaaccccccaccccaggacaggccccggtgtgtgatgttccccgccctgtgtccaagtgttctcgttgttcagttgccacctgtgagtgagaacatgcggtgtttggttttctgtccttgcgatagtttgctcagaatgatggtttccagcttcatctatgtccctacaaaggacgtgaagctcatccttttttatggctgcatactactccgtggtgtatatgtgccacattttcttaatccagtcagtcattgatggacatttgggttggttctaattctttgctattgt

SEQ ID NO: 884 - DNA, 4029 bp, Homo sapiens
catattttcagacttcctcctcatccttcttcttgccagtagttgtattataattcctgccagtagttacattataattttggttatatcaatattgagtttttatgggattataactagataaatgccattcatagttaagtgatagagtatattgtgacttttttcctgcatgttttattttttctggacttcacagttgtctctcttttttttaaaaaaattagttttcaatgttcttagctttaattcataaactcacccctaattgtataaatctctcaacatgtttaagcacatttggcattatatcaattttatcttttccaggtgccttctaatctgtcccagtctggactaattgttcttcctggcttgctgtatggctgtctactcaagatgtcccttcaccatcattctagggattcccttttcctctcttgtgggttagattcttcagttcttggagactgtcatcttctttcatggtttcccactcttgttttggcggagcacatctttagtaacttcctgacaaagtgtatggtttgagatttcgctgattttaaaatgcccttattatatagtcacacttgatttatagtctgtcttggtatagaattctaggctgagaagagttttccctcaaaatcagaaggttttgcccaattgttttttagctgctagtattgctgttaaaaaggataatgtcattttgattctagattcttttatgaaacctgtttcttctctggcagcttttaggatcttctgtttctttggtattcagaaatttcatgagatatgtgtgcttctattttggtcttattttcatctgttttgccaggtactcatgcaactttccagtttgaaaactcacatccttcacttttgagtatttttcttgagttatgtcttcggtttcttctcagtgttctctgtttctggaactcctaaaatatatttaacatcctgaactcttagtttttgtttagtcttctgattttcatttgtctttttattctgtatattctgttaattcctcggcttcatggtcttctagcccttcttttgcctatcttatggggttgaggattaaacagtttatatacctgaggtgcttaggatatgtctgtcatatagtaagtgcttgtgttagctgtaattgttgtttactttcataactgtcttgagggaaaggtctttggtcttgattctttgacttcttggctgtacatgaccttggacgagttatgtaatctctttgagacctacctccctcttctgtatagtgttaataagctctagctctcagatgtttgtgagggtcgaatggagtatatatgtgaaaatgtttaatacctttgtacagaattaatagttagtacgtggatctttcaaatatcaaaagttttcagtttgatgggaaaatgatgtctgaattttcagggttatttttaagagtacttgattatgactgtcttgtaaatctctatgagctaggtatacttgcactaaatgctaatgctttttaaagaagttatgtcttaatattcagtctcattatgttaggttgaagatagaagattatgaaaatattctctgaaaagctctggttttacttcagattgtataaatctgtgtaatgtaataattatttaagaatgacatgattactactctaaacccatagaaggggtatttgttggattatttattttcacttaaatggtatttgagattaggaaaaagaaaatctgtcttttggtttttcttgatagtattaatgtaatttcaaatgttagctcatttttgttaatggtggctttttgtttgtttgttttgttttaaggtttttggattcaaagcataaaaaccattacaagatatacaatctgtaagtatgttttcttatttgtatgcttgcaaatatcttctaaaacaactattaagtgaaagttatctgcttgttagagtgaggtagagttaaagatacattttaacagaattgtattcctaaaccgattaagtcaagaagtccaagagcattgttagatcatttagaaagtgtagtgatgaggtaaaacattgttggcacagattcatgttacttgatctgctttaaatgacttggcatctagcccatatttgagcccataaccgtgtggtaatttgaagtgtaattcacagtagagcttctgttaaagcactaatagcatcttccatggaggtatacttcagagtgaatataattttgtttatcctgtgtctctagagctattgactgaaaaagctgttagggcattctctaactgtacatcacctaagttatttaaaattgctgaattaggtggcttgtcttgtctaggacagagttttaaggactgcccacctgattgatagagctagttgaccttatctttaactttttgtttttcttttgactttgggagtagagatgtgaaaaggtaaaaaggaaggaaggaagagaaaacttaactctttttgcccatgaagactgtttttccttctcaaaatattgactattttctgatttgtaaaaatcggcacataaaacgtgttattttttacttgacttttatctttcccatgtgatatctataaattatagataggaaaaatttatctgtaatttagtgatctttctagtgtgataaaacgtcagaagtactgagagtggagtggacattgatattgttactctcagtaagttttcactgatttttctcagagtcatgaaggaacaaacgtttgttaagtccttatcacttattagataacacaaaacatgttgggggggtgtgtacagaggtgagtaagatgtagctcccattctcaagtcgcttacattctaatgtaaaaggtagacaaagcattacagaagaagtaactctgctatagaaggttgcaatgaagagaacattggaaacactaattttaccttataaagaaggtttcataaaggaaggcaagtttgagctggggtgaaaaggaccagtaagggttgactttcaagccaaggagaggaggggaagtgatgttacaggccaaaggaatggcattgtaagaagcttgttggcataaaagtgtttagaatatggcagcgaattcattatcatcagattgtggtgtctgtatgttgggggtgggagagaattgtggtggcaataggcaacaagataaaagaaagtaaaaggtgttatggaaacttaatgggtccagcttacaaatgatctatgcatttaggggtctttctcttttcctgataaacctctcctacaaagagccttgttgcggataccatagtgtttctttggaggaaaataaaaactacaaagctttgtattttttgcacaactggattcagaatataagtaataaaaaaggacaagaactttcaaaagctagaagccattaaactgagtcacttcagggttagactatcagaactggggatttagaaagtctcagaatggaaatcgaaggacaccaaagacaaattcggcctttttcaaaattttattctagtttaacatattcaaagaaagggaaggaaattcttttcattcctgtgtgtagtgacttcctgctttaagaacttaggacttcagctgtactatcagtattgtaggccacttaacattattatggttaaagttggcattggagagagcctaggaacctaactgcctgtttgtttttatatttccaaccattggattcccaagttaatgaagtctgtttattagttgagggtagctcttaatgcatatattttaatgccccttccccacatggaatcataagctttcagaactggagagtacctgaaagagatcatttagtccaaccttctcattttacagatggggaatctgaggcctagagaagttaagtgagttgaacaaggtcacacaggtacatatggtagccgaccatccactgtttatgccaatattccctttacgttttgcttttttgcttgttcgttttaacctctccaaattt

SEQ ID NO: 885 - DNA, 4047 bp, Homo sapiens
aggtgcttaggatatgtctgtcatatagtaagtgcttgtgttagctgtaattgttgtttactttcataactgtcttgagggaaaggtctttggtcttgattctttgacttcttggctgtacatgaccttggacgagttatgtaatctctttgagacctacctccctcttctgtatagtgttaataagctctagctctcagatgtttgtgagggtcgaatggagtatatatgtgaaaatgtttaatacctttgtacagaattaatagttagtacgtggatctttcaaatatcaaaagttttcagtttgatgggaaaatgatgtctgaattttcagggttatttttaagagtacttgattatgactgtcttgtaaatctctatgagctaggtatacttgcactaaatgctaatgctttttaaagaagttatgtcttaatattcagtctcattatgttaggttgaagatagaagattatgaaaatattctctgaaaagctctggttttacttcagattgtataaatctgtgtaatgtaataattatttaagaatgacatgattactactctaaacccatagaaggggtatttgttggattatttattttcacttaaatggtatttgagattaggaaaaagaaaatctgtcttttggtttttcttgatagtattaatgtaatttcaaatgttagctcatttttgttaatggtggctttttgtttgtttgttttgttttaaggtttttggattcaaagcataaaaaccattacaagatatacaatctgtaagtatgttttcttatttgtatgcttgcaaatatcttctaaaacaactattaagtgaaagttatctgcttgttagagtgaggtagagttaaagatacattttaacagaattgtattcctaaaccgattaagtcaagaagtccaagagcattgttagatcatttagaaagtgtagtgatgaggtaaaacattgttggcacagattcatgttacttgatctgctttaaatgacttggcatctagcccatatttgagcccataaccgtgtggtaatttgaagtgtaattcacagtagagcttctgttaaagcactaatagcatcttccatggaggtatacttcagagtgaatataattttgtttatcctgtgtctctagagctattgactgaaaaagctgttagggcattctctaactgtacatcacctaagttatttaaaattgctgaattaggtggcttgtcttgtctaggacagagttttaaggactgcccacctgattgatagagctagttgaccttatctttaactttttgtttttcttttgactttgggagtagagatgtgaaaaggtaaaaaggaaggaaggaagagaaaacttaactctttttgcccatgaagactgtttttccttctcaaaatattgactattttctgatttgtaaaaatcggcacataaaacgtgttattttttacttgacttttatctttcccatgtgatatctataaattatagataggaaaaatttatctgtaatttagtgatctttctagtgtgataaaacgtcagaagtactgagagtggagtggacattgatattgttactctcagtaagttttcactgatttttctcagagtcatgaaggaacaaacgtttgttaagtccttatcacttattagataacacaaaacatgttgggggggtgtgtacagaggtgagtaagatgtagctcccattctcaagtcgcttacattctaatgtaaaaggtagacaaagcattacagaagaagtaactctgctatagaaggttgcaatgaagagaacattggaaacactaattttaccttataaagaaggtttcataaaggaaggcaagtttgagctggggtgaaaaggaccagtaagggttgactttcaagccaaggagaggaggggaagtgatgttacaggccaaaggaatggcattgtaagaagcttgttggcataaaagtgtttagaatatggcagcgaattcattatcatcagattgtggtgtctgtatgttgggggtgggagagaattgtggtggcaataggcaacaagataaaagaaagtaaaaggtgttatggaaacttaatgggtccagcttacaaatgatctatgcatttaggggtctttctcttttcctgataaacctctcctacaaagagccttgttgcggataccatagtgtttctttggaggaaaataaaaactacaaagctttgtattttttgcacaactggattcagaatataagtaataaaaaaggacaagaactttcaaaagctagaagccattaaactgagtcacttcagggttagactatcagaactggggatttagaaagtctcagaatggaaatcgaaggacaccaaagacaaattcggcctttttcaaaattttattctagtttaacatattcaaagaaagggaaggaaattcttttcattcctgtgtgtagtgacttcctgctttaagaacttaggacttcagctgtactatcagtattgtaggccacttaacattattatggttaaagttggcattggagagagcctaggaacctaactgcctgtttgtttttatatttccaaccattggattcccaagttaatgaagtctgtttattagttgagggtagctcttaatgcatatattttaatgccccttccccacatggaatcataagctttcagaactggagagtacctgaaagagatcatttagtccaaccttctcattttacagatggggaatctgaggcctagagaagttaagtgagttgaacaaggtcacacaggtacatatggtagccgaccatccactgtttatgccaatattccctttacgttttgcttttttgcttgttcgttttaacctctccaaattttactgacttcagaagtttctagaactaagttatagcatgttttgagttctaatgtcactttccgatcttctttaccttttttctacctctgtttgtatttctggttctggttaagtgagtctggtaagcagcaggtgttctattttatttcttttatttttaggatagtattacatgtgatatatatgtctttgcaaacatacataatttgaagatcttaaaatatttgcactaggcatacccacatttaatagtatgttaaatcttttatagcaattatgatatacatgggtgaagaagagttcctaatatggcctttctgattaactgtatctgtttatatctgtgttttcttcaggcattcataacattaagcaaattcaggtgtactgttacttaattgaattaatcagtttgttttgtacaagtatattttatttttgttccttgttgtataatctggtaggaatggggaaggggagatagtgaataaagagatgtatacttcttgcctttgaggaatttaagttttcactgtataccaattttttaaaggtatttactatatttcagtgcatattttatttgacatactttatcattttgtggtaaacctttagctttactaattttcatctattaagttttcttttgtaagatggtgatagcttcatcaaagagagtaaagaagagacctgcctacctagctgattctatggcaaatctcacttctctggaagcttttcctgttaatcttattccttcagtttctgcctcttgtttcataaaaactcattctttaaatgcttattcatttctcttgtctcatataaaccaatatgaggtactggtatcttttgagttttagttataaggaagcataaatggttaaatttaaatggctaaaccccatttgccatttgtgtatctttaattttagtttgttgagagacttatcactaccaaaccacaaagaatttaaaagaaactgtcagtaggtataggtggaaggagggcatttatcagagattttaatttaagaagaaagtcttcatccttatcctaccaacccccattccctgagcatatttatcattactagtcccagcatatttgctcccatatttcctatg

SEQ ID NO: 886 - DNA, 4047 bp, Homo sapiens
aatgatgtctgaattttcagggttatttttaagagtacttgattatgactgtcttgtaaatctctatgagctaggtatacttgcactaaatgctaatgctttttaaagaagttatgtcttaatattcagtctcattatgttaggttgaagatagaagattatgaaaatattctctgaaaagctctggttttacttcagattgtataaatctgtgtaatgtaataattatttaagaatgacatgattactactctaaacccatagaaggggtatttgttggattatttattttcacttaaatggtatttgagattaggaaaaagaaaatctgtcttttggtttttcttgatagtattaatgtaatttcaaatgttagctcatttttgttaatggtggctttttgtttgtttgttttgttttaaggtttttggattcaaagcataaaaaccattacaagatatacaatctgtaagtatgttttcttatttgtatgcttgcaaatatcttctaaaacaactattaagtgaaagttatctgcttgttagagtgaggtagagttaaagatacattttaacagaattgtattcctaaaccgattaagtcaagaagtccaagagcattgttagatcatttagaaagtgtagtgatgaggtaaaacattgttggcacagattcatgttacttgatctgctttaaatgacttggcatctagcccatatttgagcccataaccgtgtggtaatttgaagtgtaattcacagtagagcttctgttaaagcactaatagcatcttccatggaggtatacttcagagtgaatataattttgtttatcctgtgtctctagagctattgactgaaaaagctgttagggcattctctaactgtacatcacctaagttatttaaaattgctgaattaggtggcttgtcttgtctaggacagagttttaaggactgcccacctgattgatagagctagttgaccttatctttaactttttgtttttcttttgactttgggagtagagatgtgaaaaggtaaaaaggaaggaaggaagagaaaacttaactctttttgcccatgaagactgtttttccttctcaaaatattgactattttctgatttgtaaaaatcggcacataaaacgtgttattttttacttgacttttatctttcccatgtgatatctataaattatagataggaaaaatttatctgtaatttagtgatctttctagtgtgataaaacgtcagaagtactgagagtggagtggacattgatattgttactctcagtaagttttcactgatttttctcagagtcatgaaggaacaaacgtttgttaagtccttatcacttattagataacacaaaacatgttgggggggtgtgtacagaggtgagtaagatgtagctcccattctcaagtcgcttacattctaatgtaaaaggtagacaaagcattacagaagaagtaactctgctatagaaggttgcaatgaagagaacattggaaacactaattttaccttataaagaaggtttcataaaggaaggcaagtttgagctggggtgaaaaggaccagtaagggttgactttcaagccaaggagaggaggggaagtgatgttacaggccaaaggaatggcattgtaagaagcttgttggcataaaagtgtttagaatatggcagcgaattcattatcatcagattgtggtgtctgtatgttgggggtgggagagaattgtggtggcaataggcaacaagataaaagaaagtaaaaggtgttatggaaacttaatgggtccagcttacaaatgatctatgcatttaggggtctttctcttttcctgataaacctctcctacaaagagccttgttgcggataccatagtgtttctttggaggaaaataaaaactacaaagctttgtattttttgcacaactggattcagaatataagtaataaaaaaggacaagaactttcaaaagctagaagccattaaactgagtcacttcagggttagactatcagaactggggatttagaaagtctcagaatggaaatcgaaggacaccaaagacaaattcggcctttttcaaaattttattctagtttaacatattcaaagaaagggaaggaaattcttttcattcctgtgtgtagtgacttcctgctttaagaacttaggacttcagctgtactatcagtattgtaggccacttaacattattatggttaaagttggcattggagagagcctaggaacctaactgcctgtttgtttttatatttccaaccattggattcccaagttaatgaagtctgtttattagttgagggtagctcttaatgcatatattttaatgccccttccccacatggaatcataagctttcagaactggagagtacctgaaagagatcatttagtccaaccttctcattttacagatggggaatctgaggcctagagaagttaagtgagttgaacaaggtcacacaggtacatatggtagccgaccatccactgtttatgccaatattccctttacgttttgcttttttgcttgttcgttttaacctctccaaattttactgacttcagaagtttctagaactaagttatagcatgttttgagttctaatgtcactttccgatcttctttaccttttttctacctctgtttgtatttctggttctggttaagtgagtctggtaagcagcaggtgttctattttatttcttttatttttaggatagtattacatgtgatatatatgtctttgcaaacatacataatttgaagatcttaaaatatttgcactaggcatacccacatttaatagtatgttaaatcttttatagcaattatgatatacatgggtgaagaagagttcctaatatggcctttctgattaactgtatctgtttatatctgtgttttcttcaggcattcataacattaagcaaattcaggtgtactgttacttaattgaattaatcagtttgttttgtacaagtatattttatttttgttccttgttgtataatctggtaggaatggggaaggggagatagtgaataaagagatgtatacttcttgcctttgaggaatttaagttttcactgtataccaattttttaaaggtatttactatatttcagtgcatattttatttgacatactttatcattttgtggtaaacctttagctttactaattttcatctattaagttttcttttgtaagatggtgatagcttcatcaaagagagtaaagaagagacctgcctacctagctgattctatggcaaatctcacttctctggaagcttttcctgttaatcttattccttcagtttctgcctcttgtttcataaaaactcattctttaaatgcttattcatttctcttgtctcatataaaccaatatgaggtactggtatcttttgagttttagttataaggaagcataaatggttaaatttaaatggctaaaccccatttgccatttgtgtatctttaattttagtttgttgagagacttatcactaccaaaccacaaagaatttaaaagaaactgtcagtaggtataggtggaaggagggcatttatcagagattttaatttaagaagaaagtcttcatccttatcctaccaacccccattccctgagcatatttatcattactagtcccagcatatttgctcccatatttcctatgcttacctgtgaagattttcataactttttccttgctttttactgtcactgttggttctgtgatttatgacagatactgctcttgtaggaatgctggctttgactgaaatttgttactgcttttgtatttaaaactttttttttattataagtagaattatggaacagtagtagaaaaagtttgacttttgtaatcagagatactgagcttgagttctggctctttcatttgtatactgttatttggggcaagttttttaatgctcttaagtcttagctttctcatatataaaatggagataataacagttatca

SEQ ID NO: 887 - DNA, 4053 bp, Homo sapiens
tatggcaaatctcacttctctggaagcttttcctgttaatcttattccttcagtttctgcctcttgtttcataaaaactcattctttaaatgcttattcatttctcttgtctcatataaaccaatatgaggtactggtatcttttgagttttagttataaggaagcataaatggttaaatttaaatggctaaaccccatttgccatttgtgtatctttaattttagtttgttgagagacttatcactaccaaaccacaaagaatttaaaagaaactgtcagtaggtataggtggaaggagggcatttatcagagattttaatttaagaagaaagtcttcatccttatcctaccaacccccattccctgagcatatttatcattactagtcccagcatatttgctcccatatttcctatgcttacctgtgaagattttcataactttttccttgctttttactgtcactgttggttctgtgatttatgacagatactgctcttgtaggaatgctggctttgactgaaatttgttactgcttttgtatttaaaactttttttttattataagtagaattatggaacagtagtagaaaaagtttgacttttgtaatcagagatactgagcttgagttctggctctttcatttgtatactgttatttggggcaagttttttaatgctcttaagtcttagctttctcatatataaaatggagataataacagttatcacgtgattgtgaggatgaaacaaaaaaaagtggaaactctttgtaaggtgtgttcatctggttgacacttagtagtcattacttccactttccgtccatatagtcctcttaacagtaatatttgagaggcatttttattaaagcagtcttaaggagtgttcgtcaaaccacatgttctgggatcctgagaaagtaggggaagtttagagaactgaagctgcacaaaactaatgtttattttctgttgtgttgtcctgagaccagcttcttagattgtgtttcctagtcctacatctctgattccttataaaatattccattatgaattcttcactattgacaatttctccccttttatcttaaaagtaccaaagaaagtgtaaaatgtgactgtcttgtcagtcctctttttcctgtttttcatgtcagtgggtatgaaattactagcaaggatgcatatatgtgcatatgtcattactaaatgcattttctttctagaaaaactcaatatactaaattgtactaaaaaggaaaagcttgttttgttttgagtggtagtatgaaagttgttttattttaggtctgaccagttagaaaccaatggattgtagtttatttataattagttaaaccttcatgtgaatttggttttgaattacctttaaggtagagaagaaactatatagatgtttttcagggtttctaaatgtacaatacaggttcacaatcacttatttgaaactcttggggccaagtatgtttccattttcagaaattttagttttcaaaaggtagcacagataaatatacttttacataaacaccccagtggggtgtgggtcagtacctgaaatgaaatgttttactcttcgctctaagtgtattaaatattatgtacaatcttattacttcagatcaggatttgctgtagttgagtttgccataaaacttaagagaaaattttagatgttttgaacttttgggatattgaaattgcaggttaaggagctatggacctttatttgttttaaaatgctaagagtttattttaagtaatttttaaaaaatttgttttgcatagtagttggagttaccagggtactgctaaccacactgatatgtaagatctctttctgagccttttattgtttgtaaacatggcctgttaatcattagaaagccagtacatactaacatatcactgctattaagacaaatattagcatactctagtaatgacaagtcagcattttactattctgtattgattttacttattctttcattactctcatactgtaattaaaacttgcaatctgagagactgttgaaaaaggtgatcgttggcttttcaacagggagtaaggtctggtttaaaaaaaaattagtaagcatttggccaagtagattaacaacattcagtttttctttactgtccttatgcttttactatttttaacatatatctttttgaagaatagtttgagaattatgtatgcttaactatgagatacagatactattgaaactagtcagttgtttataggtacttgtaaaattaaaaatatattccaatagcatgcagatttttcatagaggaaatttgaaagcatggaagcacctgaatttacagtactctgtattagtggcatcacaagtttttaagcaaatgtattagctctaattgcatacacttaatcttttaagctttggttttattattataatatgggggtgataacagtatctacttaatagaattcttgttattacatgaaataattaatgttaaacacagcataatatgtgtcacattataaagattcaggcaatgtttgttagtattagtacttttttttcttcctaagtgcaaaagataactttatatcacttttaaacttttcttttagttgtgctgaaagacattatgacaccgccaaatttaattgcagaggtaggtatgaatgtactgtactatgttgtataacttaaacccgatagactgtatcttactgtcataacaataatgagtcatccagattatcgagtgagatacatatttaagaattatctttaaaaatttcaaaaattttaattttactgttgtgttttaggaaaaagtattgcataaagctattaatattgtcaggaagactaaagtgcagcatagactaagaattaggaaaattcctagactaaaaatagtataaggagagggtttacctactatttgaggcagttggtctaatagtaagcaatcacagggagaaagcagaactacttaactcttctgtgttgaggaatgacataaaaggtaggaaaggatataacaaatgttgataagaggagtctgatggatgagaggagggaactgctttaaatgagtttctacttcagacataagttaattctcagagcccacaaaaactttcacttttatttgtgaaatacaactcagttctcatggcttaacactttaaaccatgagaaaactgaagagttgagaagcttggcagatgctgctgtgatagtcaaaaagaaagtgggtgccatgagctactattgatgtatttgccattgatccctcctgaaaatctagaatggactttcagacaaatggtttgaaaattctaaatcactaatgattgagatttagtataggtttactaagaacgggttttttttgtttttgtttttggtggatttaggctgttgcttactaagcaaagcaggctttagttgaggtttatcttgctttaaacagatatttaacagattttcctggaggtttttgtgtaccactgggaaaatgaagttaggcagatgactaagtgaaagctgtcctgctgactccttataatgatagtcattgtctaccagaagatctctcctgtcacaccaaaggataattgattatatcctgtaccatattatgagtcacctgattggagatataagacatacttctcacatatttagatgacacaggttagtacattgaatatcagccagggtttttaaggatcttaatagagtggaactaaggtagaaactattaagagcaattaatagtgatatatctatagtcctgtttctaaacaagtttttttaaaaacctcaactctgactatagtgaacagagaagtcttggactcttacaattcatgtgagaagacctgaaactttgataacaattatatacattttgtgagtaatttctttggtgtatgccttcacatatctctggtatgtgacctatgctgcagtccattgagcatagattcccagaatgtattctcctgcagaaaatggaggaaaata

SEQ ID NO: 888 - DNA, 4043 bp, Homo sapiens
tttcagaaattttagttttcaaaaggtagcacagataaatatacttttacataaacaccccagtggggtgtgggtcagtacctgaaatgaaatgttttactcttcgctctaagtgtattaaatattatgtacaatcttattacttcagatcaggatttgctgtagttgagtttgccataaaacttaagagaaaattttagatgttttgaacttttgggatattgaaattgcaggttaaggagctatggacctttatttgttttaaaatgctaagagtttattttaagtaatttttaaaaaatttgttttgcatagtagttggagttaccagggtactgctaaccacactgatatgtaagatctctttctgagccttttattgtttgtaaacatggcctgttaatcattagaaagccagtacatactaacatatcactgctattaagacaaatattagcatactctagtaatgacaagtcagcattttactattctgtattgattttacttattctttcattactctcatactgtaattaaaacttgcaatctgagagactgttgaaaaaggtgatcgttggcttttcaacagggagtaaggtctggtttaaaaaaaaattagtaagcatttggccaagtagattaacaacattcagtttttctttactgtccttatgcttttactatttttaacatatatctttttgaagaatagtttgagaattatgtatgcttaactatgagatacagatactattgaaactagtcagttgtttataggtacttgtaaaattaaaaatatattccaatagcatgcagatttttcatagaggaaatttgaaagcatggaagcacctgaatttacagtactctgtattagtggcatcacaagtttttaagcaaatgtattagctctaattgcatacacttaatcttttaagctttggttttattattataatatgggggtgataacagtatctacttaatagaattcttgttattacatgaaataattaatgttaaacacagcataatatgtgtcacattataaagattcaggcaatgtttgttagtattagtacttttttttcttcctaagtgcaaaagataactttatatcacttttaaacttttcttttagttgtgctgaaagacattatgacaccgccaaatttaattgcagaggtaggtatgaatgtactgtactatgttgtataacttaaacccgatagactgtatcttactgtcataacaataatgagtcatccagattatcgagtgagatacatatttaagaattatctttaaaaatttcaaaaattttaattttactgttgtgttttaggaaaaagtattgcataaagctattaatattgtcaggaagactaaagtgcagcatagactaagaattaggaaaattcctagactaaaaatagtataaggagagggtttacctactatttgaggcagttggtctaatagtaagcaatcacagggagaaagcagaactacttaactcttctgtgttgaggaatgacataaaaggtaggaaaggatataacaaatgttgataagaggagtctgatggatgagaggagggaactgctttaaatgagtttctacttcagacataagttaattctcagagcccacaaaaactttcacttttatttgtgaaatacaactcagttctcatggcttaacactttaaaccatgagaaaactgaagagttgagaagcttggcagatgctgctgtgatagtcaaaaagaaagtgggtgccatgagctactattgatgtatttgccattgatccctcctgaaaatctagaatggactttcagacaaatggtttgaaaattctaaatcactaatgattgagatttagtataggtttactaagaacgggttttttttgtttttgtttttggtggatttaggctgttgcttactaagcaaagcaggctttagttgaggtttatcttgctttaaacagatatttaacagattttcctggaggtttttgtgtaccactgggaaaatgaagttaggcagatgactaagtgaaagctgtcctgctgactccttataatgatagtcattgtctaccagaagatctctcctgtcacaccaaaggataattgattatatcctgtaccatattatgagtcacctgattggagatataagacatacttctcacatatttagatgacacaggttagtacattgaatatcagccagggtttttaaggatcttaatagagtggaactaaggtagaaactattaagagcaattaatagtgatatatctatagtcctgtttctaaacaagtttttttaaaaacctcaactctgactatagtgaacagagaagtcttggactcttacaattcatgtgagaagacctgaaactttgataacaattatatacattttgtgagtaatttctttggtgtatgccttcacatatctctggtatgtgacctatgctgcagtccattgagcatagattcccagaatgtattctcctgcagaaaatggaggaaaataatacttggcttccctaatgattacatgtgtatacaacactaacatttgcaagaccacctttaaataacacacttagcatttttattttatgaaatgtaatatgtagttctttgcatagtttatcctattagtaatctattctgtctttggaatatgttttgtgatgatgaaataaatactataaatagtattattccttttgcattgagagtcctgacgaaatgtccatgtgacagttcattttgggtttagctctacctctaatatgtgacctatgctaccagtccgtatagcgtaaattcccagaatatatcctcctgaataaaatgggggaaaataatacctggcttccttaatgattatatttaagacttatcaagagactattttctatttaacaattagaaagttaagcaatacattatttttctctggaatccagtgtttcttttaaatacctgttaagtttgtatgcaacatttctaaagttacctacttgttaattaaaaattcaagagtttttttttcttattctgaggttatctttttaccacagttgcacaatatccttttgaagaccataacccaccacagctagaacttatcaaacccttttgtgaagatcttgaccaatggctaagtgaagatgacaatcatgttgcagcaattcactgtaaagctggaaagggacgaactggtgtaatgatatgtgcatatttattacatcggggcaaatttttaaaggcacaagaggccctagatttctatggggaagtaaggaccagagacaaaaaggtaagttattttttgatgtttttcctttcctcttcctggatctgagaatttattggaaaacagattttgggtttctttttttccttcagttttattgaggtgtaattgacaagtaaaaattatatataaatacaatgtataatatgatgttttgatgtatgtgtatatacattgtgaaatgattactacagtcaaactacttaacatattcatcacctcacataattattattctccccccagggtgaaagcatttaagatctacaagctacaattttcaattatacaatgttattattaactatagtcactatgctgtccagtagagcttcagatcttgttcatcttgtgttcctccctccccaccctcagtccctggaaaacaggttttaaagatagttgctaatccttatttcttctaaatttttaaatcagttgctgcctcaatttctatatgagaaatgactgattgatttcatttttctgttcacgctaccattttcatatcatactagcacatgttacccattaactgtattgcagatttggtctcacaaaattcttctaaaataacatttttaaaaagcatattaatcaaaaataagctttatatttctgaagcttgtttgagcatagaatgcctttggataaaataccattacctagtaaagtgtgaacttttataatccataa

SEQ ID NO: 889 - DNA, 4046 bp, Homo sapiens
ccagattatcgagtgagatacatatttaagaattatctttaaaaatttcaaaaattttaattttactgttgtgttttaggaaaaagtattgcataaagctattaatattgtcaggaagactaaagtgcagcatagactaagaattaggaaaattcctagactaaaaatagtataaggagagggtttacctactatttgaggcagttggtctaatagtaagcaatcacagggagaaagcagaactacttaactcttctgtgttgaggaatgacataaaaggtaggaaaggatataacaaatgttgataagaggagtctgatggatgagaggagggaactgctttaaatgagtttctacttcagacataagttaattctcagagcccacaaaaactttcacttttatttgtgaaatacaactcagttctcatggcttaacactttaaaccatgagaaaactgaagagttgagaagcttggcagatgctgctgtgatagtcaaaaagaaagtgggtgccatgagctactattgatgtatttgccattgatccctcctgaaaatctagaatggactttcagacaaatggtttgaaaattctaaatcactaatgattgagatttagtataggtttactaagaacgggttttttttgtttttgtttttggtggatttaggctgttgcttactaagcaaagcaggctttagttgaggtttatcttgctttaaacagatatttaacagattttcctggaggtttttgtgtaccactgggaaaatgaagttaggcagatgactaagtgaaagctgtcctgctgactccttataatgatagtcattgtctaccagaagatctctcctgtcacaccaaaggataattgattatatcctgtaccatattatgagtcacctgattggagatataagacatacttctcacatatttagatgacacaggttagtacattgaatatcagccagggtttttaaggatcttaatagagtggaactaaggtagaaactattaagagcaattaatagtgatatatctatagtcctgtttctaaacaagtttttttaaaaacctcaactctgactatagtgaacagagaagtcttggactcttacaattcatgtgagaagacctgaaactttgataacaattatatacattttgtgagtaatttctttggtgtatgccttcacatatctctggtatgtgacctatgctgcagtccattgagcatagattcccagaatgtattctcctgcagaaaatggaggaaaataatacttggcttccctaatgattacatgtgtatacaacactaacatttgcaagaccacctttaaataacacacttagcatttttattttatgaaatgtaatatgtagttctttgcatagtttatcctattagtaatctattctgtctttggaatatgttttgtgatgatgaaataaatactataaatagtattattccttttgcattgagagtcctgacgaaatgtccatgtgacagttcattttgggtttagctctacctctaatatgtgacctatgctaccagtccgtatagcgtaaattcccagaatatatcctcctgaataaaatgggggaaaataatacctggcttccttaatgattatatttaagacttatcaagagactattttctatttaacaattagaaagttaagcaatacattatttttctctggaatccagtgtttcttttaaatacctgttaagtttgtatgcaacatttctaaagttacctacttgttaattaaaaattcaagagtttttttttcttattctgaggttatctttttaccacagttgcacaatatccttttgaagaccataacccaccacagctagaacttatcaaacccttttgtgaagatcttgaccaatggctaagtgaagatgacaatcatgttgcagcaattcactgtaaagctggaaagggacgaactggtgtaatgatatgtgcatatttattacatcggggcaaatttttaaaggcacaagaggccctagatttctatggggaagtaaggaccagagacaaaaaggtaagttattttttgatgtttttcctttcctcttcctggatctgagaatttattggaaaacagattttgggtttctttttttccttcagttttattgaggtgtaattgacaagtaaaaattatatataaatacaatgtataatatgatgttttgatgtatgtgtatatacattgtgaaatgattactacagtcaaactacttaacatattcatcacctcacataattattattctccccccagggtgaaagcatttaagatctacaagctacaattttcaattatacaatgttattattaactatagtcactatgctgtccagtagagcttcagatcttgttcatcttgtgttcctccctccccaccctcagtccctggaaaacaggttttaaagatagttgctaatccttatttcttctaaatttttaaatcagttgctgcctcaatttctatatgagaaatgactgattgatttcatttttctgttcacgctaccattttcatatcatactagcacatgttacccattaactgtattgcagatttggtctcacaaaattcttctaaaataacatttttaaaaagcatattaatcaaaaataagctttatatttctgaagcttgtttgagcatagaatgcctttggataaaataccattacctagtaaagtgtgaacttttataatccataaaaattattcttttataagaatattcataaatgtagttagattaatagaagattctcgattctttgatcagaaaactaaggactatattgaaaaatcagtgacaaatttaattcttatagtacatctgaaagaaaaaagaaaactcttgggagaacttttacagtgatttaattttgctgttgatatatttctttgggtggtaagtatggcaaaacatgttaaaatttaatgcaaagagattttgtacatttttccatctctaagaaggacaaagcctaagcccctccagatagatagaaaaactcatttagagagttctccttcatgttaatctaatttcttcttaattcagctgtaaaacagaaatagaatgatcgtattaatcatttaaagctgtgtaattgcatagattccttgttcctttaccccctcttatatcttgtttcctatcctttgtgactttttttgcattatatataaggatgccgaaatactgtttattgttgatagtttacaaaattgaatcttacattagtgcataattttggtgaatgttgaagattatggtagattgccttacatttctgcatattgtttgcaccttggaatgatagcactggcatgaattatagagctgaggatctaaagatttttactttgatttatcccattatcatctgcagggaaacaattgcttttactgattaaaaatgcaggctgggcacagcggctcacgcctgtaatcccagtactttgggaggccgaggcgggcggatcacaaggtcaagagatcgagaccatcctggccaaccaacatggtgaaacctcatctctactaaaaatacaaaaattagctgggtgtggtggcgcgtgcctgtaatcccagctactcaggatgctgaggcaggagaatcgcttgaacccgggaggtggaggttgcagtgagccgagactgtgccactgcactccagcctggtgatagagggagactccatctcaaaaaaaaaaaaaaatgcagtagcaaaagcgatggtagaaatttaaaacagagttgatgagcagcatatattttggtagtggaaaaaaaggtaaaaaattttttgtaataaaatagaaaaattttgtaatgtggaggcgcagaacactagatttaagccagggggtcttaaattgtgttacattccttttaaagtctgatggaaggtataaatgttctcccctcaaaaaatgtgcatagtgtacataaaattttgcagtttttattacattgaa

SEQ ID NO: 890 - DNA, 4049 bp, Homo sapiens
aaactattaagagcaattaatagtgatatatctatagtcctgtttctaaacaagtttttttaaaaacctcaactctgactatagtgaacagagaagtcttggactcttacaattcatgtgagaagacctgaaactttgataacaattatatacattttgtgagtaatttctttggtgtatgccttcacatatctctggtatgtgacctatgctgcagtccattgagcatagattcccagaatgtattctcctgcagaaaatggaggaaaataatacttggcttccctaatgattacatgtgtatacaacactaacatttgcaagaccacctttaaataacacacttagcatttttattttatgaaatgtaatatgtagttctttgcatagtttatcctattagtaatctattctgtctttggaatatgttttgtgatgatgaaataaatactataaatagtattattccttttgcattgagagtcctgacgaaatgtccatgtgacagttcattttgggtttagctctacctctaatatgtgacctatgctaccagtccgtatagcgtaaattcccagaatatatcctcctgaataaaatgggggaaaataatacctggcttccttaatgattatatttaagacttatcaagagactattttctatttaacaattagaaagttaagcaatacattatttttctctggaatccagtgtttcttttaaatacctgttaagtttgtatgcaacatttctaaagttacctacttgttaattaaaaattcaagagtttttttttcttattctgaggttatctttttaccacagttgcacaatatccttttgaagaccataacccaccacagctagaacttatcaaacccttttgtgaagatcttgaccaatggctaagtgaagatgacaatcatgttgcagcaattcactgtaaagctggaaagggacgaactggtgtaatgatatgtgcatatttattacatcggggcaaatttttaaaggcacaagaggccctagatttctatggggaagtaaggaccagagacaaaaaggtaagttattttttgatgtttttcctttcctcttcctggatctgagaatttattggaaaacagattttgggtttctttttttccttcagttttattgaggtgtaattgacaagtaaaaattatatataaatacaatgtataatatgatgttttgatgtatgtgtatatacattgtgaaatgattactacagtcaaactacttaacatattcatcacctcacataattattattctccccccagggtgaaagcatttaagatctacaagctacaattttcaattatacaatgttattattaactatagtcactatgctgtccagtagagcttcagatcttgttcatcttgtgttcctccctccccaccctcagtccctggaaaacaggttttaaagatagttgctaatccttatttcttctaaatttttaaatcagttgctgcctcaatttctatatgagaaatgactgattgatttcatttttctgttcacgctaccattttcatatcatactagcacatgttacccattaactgtattgcagatttggtctcacaaaattcttctaaaataacatttttaaaaagcatattaatcaaaaataagctttatatttctgaagcttgtttgagcatagaatgcctttggataaaataccattacctagtaaagtgtgaacttttataatccataaaaattattcttttataagaatattcataaatgtagttagattaatagaagattctcgattctttgatcagaaaactaaggactatattgaaaaatcagtgacaaatttaattcttatagtacatctgaaagaaaaaagaaaactcttgggagaacttttacagtgatttaattttgctgttgatatatttctttgggtggtaagtatggcaaaacatgttaaaatttaatgcaaagagattttgtacatttttccatctctaagaaggacaaagcctaagcccctccagatagatagaaaaactcatttagagagttctccttcatgttaatctaatttcttcttaattcagctgtaaaacagaaatagaatgatcgtattaatcatttaaagctgtgtaattgcatagattccttgttcctttaccccctcttatatcttgtttcctatcctttgtgactttttttgcattatatataaggatgccgaaatactgtttattgttgatagtttacaaaattgaatcttacattagtgcataattttggtgaatgttgaagattatggtagattgccttacatttctgcatattgtttgcaccttggaatgatagcactggcatgaattatagagctgaggatctaaagatttttactttgatttatcccattatcatctgcagggaaacaattgcttttactgattaaaaatgcaggctgggcacagcggctcacgcctgtaatcccagtactttgggaggccgaggcgggcggatcacaaggtcaagagatcgagaccatcctggccaaccaacatggtgaaacctcatctctactaaaaatacaaaaattagctgggtgtggtggcgcgtgcctgtaatcccagctactcaggatgctgaggcaggagaatcgcttgaacccgggaggtggaggttgcagtgagccgagactgtgccactgcactccagcctggtgatagagggagactccatctcaaaaaaaaaaaaaaatgcagtagcaaaagcgatggtagaaatttaaaacagagttgatgagcagcatatattttggtagtggaaaaaaaggtaaaaaattttttgtaataaaatagaaaaattttgtaatgtggaggcgcagaacactagatttaagccagggggtcttaaattgtgttacattccttttaaagtctgatggaaggtataaatgttctcccctcaaaaaatgtgcatagtgtacataaaattttgcagtttttattacattgaaatatattcttttagacagaatgtaaaagaaccttcatgaaaactatgtcacttttttatgcaaaaaccagtggctactacatgagagcaatgaataaatctaagtggtacaaattaaccaaaattaagctttagttctgttcaatactaaattttaatgaaaagactgctatttaacttttaaaataacaagttgaaactatgctctttgactttgactttgcaacttttatatgatctttgatatccaatcagtgttgactttggtaaaaagtgctgaaaatgctattttacaaaagaaagaagagtaaatggaatctgtagattctattgcctgatgaaagtagacgtgtcaagaaataagaattctccaaggctcttcagataaattcatgtttcatcattttctttgccttcaagttactgagatcatttttggcaagatctgtatcattaatgctgtgttaggaaagaaaagattatgactccacattttactttcaaggttgaagagttaaactgtttaaaaagagtgtatgttatcctgtaaacagcagtatcaggctgtagaatttgtcttctgaaagcagggaacttatatatagcaaagaacttcatagtgctcccatttcttgacaaaacctctcgagaagctcttgattgaaagtcttggctttcatgaatctggcagctttcacaatagtggatttttcatgacaaatcatcttacacagggaattattcaagggttggcacttgaaacagtagaatactttcacaacaagagataagatttctttcaggattgatgacagtcttgcaccctagcgcatactgatgaagagagcagtgggtgaccatgacatggagagcttctgtctttaccagtgccccaatatcagatgtgttgtctggcagtaaggtgtactgtctgcctacagaatactgaggtttcttcaggagaagttttttggtaaagaaactttaccattttgaaagtgttaatgttttctgaagc

SEQ ID NO: 891 - DNA, 4053 bp, Homo sapiens
atttaagatctacaagctacaattttcaattatacaatgttattattaactatagtcactatgctgtccagtagagcttcagatcttgttcatcttgtgttcctccctccccaccctcagtccctggaaaacaggttttaaagatagttgctaatccttatttcttctaaatttttaaatcagttgctgcctcaatttctatatgagaaatgactgattgatttcatttttctgttcacgctaccattttcatatcatactagcacatgttacccattaactgtattgcagatttggtctcacaaaattcttctaaaataacatttttaaaaagcatattaatcaaaaataagctttatatttctgaagcttgtttgagcatagaatgcctttggataaaataccattacctagtaaagtgtgaacttttataatccataaaaattattcttttataagaatattcataaatgtagttagattaatagaagattctcgattctttgatcagaaaactaaggactatattgaaaaatcagtgacaaatttaattcttatagtacatctgaaagaaaaaagaaaactcttgggagaacttttacagtgatttaattttgctgttgatatatttctttgggtggtaagtatggcaaaacatgttaaaatttaatgcaaagagattttgtacatttttccatctctaagaaggacaaagcctaagcccctccagatagatagaaaaactcatttagagagttctccttcatgttaatctaatttcttcttaattcagctgtaaaacagaaatagaatgatcgtattaatcatttaaagctgtgtaattgcatagattccttgttcctttaccccctcttatatcttgtttcctatcctttgtgactttttttgcattatatataaggatgccgaaatactgtttattgttgatagtttacaaaattgaatcttacattagtgcataattttggtgaatgttgaagattatggtagattgccttacatttctgcatattgtttgcaccttggaatgatagcactggcatgaattatagagctgaggatctaaagatttttactttgatttatcccattatcatctgcagggaaacaattgcttttactgattaaaaatgcaggctgggcacagcggctcacgcctgtaatcccagtactttgggaggccgaggcgggcggatcacaaggtcaagagatcgagaccatcctggccaaccaacatggtgaaacctcatctctactaaaaatacaaaaattagctgggtgtggtggcgcgtgcctgtaatcccagctactcaggatgctgaggcaggagaatcgcttgaacccgggaggtggaggttgcagtgagccgagactgtgccactgcactccagcctggtgatagagggagactccatctcaaaaaaaaaaaaaaatgcagtagcaaaagcgatggtagaaatttaaaacagagttgatgagcagcatatattttggtagtggaaaaaaaggtaaaaaattttttgtaataaaatagaaaaattttgtaatgtggaggcgcagaacactagatttaagccagggggtcttaaattgtgttacattccttttaaagtctgatggaaggtataaatgttctcccctcaaaaaatgtgcatagtgtacataaaattttgcagtttttattacattgaaatatattcttttagacagaatgtaaaagaaccttcatgaaaactatgtcacttttttatgcaaaaaccagtggctactacatgagagcaatgaataaatctaagtggtacaaattaaccaaaattaagctttagttctgttcaatactaaattttaatgaaaagactgctatttaacttttaaaataacaagttgaaactatgctctttgactttgactttgcaacttttatatgatctttgatatccaatcagtgttgactttggtaaaaagtgctgaaaatgctattttacaaaagaaagaagagtaaatggaatctgtagattctattgcctgatgaaagtagacgtgtcaagaaataagaattctccaaggctcttcagataaattcatgtttcatcattttctttgccttcaagttactgagatcatttttggcaagatctgtatcattaatgctgtgttaggaaagaaaagattatgactccacattttactttcaaggttgaagagttaaactgtttaaaaagagtgtatgttatcctgtaaacagcagtatcaggctgtagaatttgtcttctgaaagcagggaacttatatatagcaaagaacttcatagtgctcccatttcttgacaaaacctctcgagaagctcttgattgaaagtcttggctttcatgaatctggcagctttcacaatagtggatttttcatgacaaatcatcttacacagggaattattcaagggttggcacttgaaacagtagaatactttcacaacaagagataagatttctttcaggattgatgacagtcttgcaccctagcgcatactgatgaagagagcagtgggtgaccatgacatggagagcttctgtctttaccagtgccccaatatcagatgtgttgtctggcagtaaggtgtactgtctgcctacagaatactgaggtttcttcaggagaagttttttggtaaagaaactttaccattttgaaagtgttaatgttttctgaagcttccaaaaagattccaaaatgggaatgtttccttgattgtgtcaccatgcttgcatttgatgaaaacttgtagccggctatactgagaaatcatatctgaagaaaggtggtacttccaatctttttgtgacctactttattattgtttttttaatgtcagggttttttttggaatggagaaaagtatttgatagaggtattgcaacagtcttattcttcttcatgctacaagtatatttgactctttctaagatacttgccttcactgttcaactgtgtgactttttgtttgtttagcattacaatcaatatcctagtaggatgatttaatcaatgatttttaattggaacaaatagtttttgtaatggtctaggcttttccaacttaactgtgctctcacatgtggtctctttttctccctctttcctccttcttatacactctcacccacacacatatgcatacataccctgtctgatgtatctgcttcttcagaatagttggctgtgctctgctgatgatgagaacttgccatttaagaaggacttgggatagtccatgtcatcatgttcagggataaaagtaaaacccaagggcatttaaactttattgtattttattttctgtttccagtccaaattaaatccaagagaaggctccataatcaaaaagtaaggacatattttaaatttgccaatgggaagatattctagtcattacagtctggtaatactatcaattctgtttctcttcagaggtgaggggagactatttgatgaaatcgtaagtcctgtagggtgttgtgaaatagggccagaatgaaagatagcaagaatagtgttatgaaaataaaatgcaaagtttataatatcatgtggtaaaatgtaatagtatttacttcatcagtagaactgctctagtagctgtatattctccatccttgcataggttggaatatcccccaagtgaaaagagattgatgggctaatagttaatagaaaatggagatctgtacatacagtgttaagaatgtagatattaaaattgttatatttagctgttacataatattaagactcagagttaagtaatttcactgaaattgattgctttttgtgtcttggagtcaaaataaataactgaaatctactatacttggctcatgcttaattaatatacttagaccatatttcggatgaattattcacagaatctaaaggagtatcctcgtgttcttaccttctttatccctgtgtttatttaaaaaggcaaaaaaaatggagcagatgctgttggttgaccatattttactgaacagtagc

SEQ ID NO: 892 - DNA, 4046 bp, Homo sapiens
gaaagaaaaaagaaaactcttgggagaacttttacagtgatttaattttgctgttgatatatttctttgggtggtaagtatggcaaaacatgttaaaatttaatgcaaagagattttgtacatttttccatctctaagaaggacaaagcctaagcccctccagatagatagaaaaactcatttagagagttctccttcatgttaatctaatttcttcttaattcagctgtaaaacagaaatagaatgatcgtattaatcatttaaagctgtgtaattgcatagattccttgttcctttaccccctcttatatcttgtttcctatcctttgtgactttttttgcattatatataaggatgccgaaatactgtttattgttgatagtttacaaaattgaatcttacattagtgcataattttggtgaatgttgaagattatggtagattgccttacatttctgcatattgtttgcaccttggaatgatagcactggcatgaattatagagctgaggatctaaagatttttactttgatttatcccattatcatctgcagggaaacaattgcttttactgattaaaaatgcaggctgggcacagcggctcacgcctgtaatcccagtactttgggaggccgaggcgggcggatcacaaggtcaagagatcgagaccatcctggccaaccaacatggtgaaacctcatctctactaaaaatacaaaaattagctgggtgtggtggcgcgtgcctgtaatcccagctactcaggatgctgaggcaggagaatcgcttgaacccgggaggtggaggttgcagtgagccgagactgtgccactgcactccagcctggtgatagagggagactccatctcaaaaaaaaaaaaaaatgcagtagcaaaagcgatggtagaaatttaaaacagagttgatgagcagcatatattttggtagtggaaaaaaaggtaaaaaattttttgtaataaaatagaaaaattttgtaatgtggaggcgcagaacactagatttaagccagggggtcttaaattgtgttacattccttttaaagtctgatggaaggtataaatgttctcccctcaaaaaatgtgcatagtgtacataaaattttgcagtttttattacattgaaatatattcttttagacagaatgtaaaagaaccttcatgaaaactatgtcacttttttatgcaaaaaccagtggctactacatgagagcaatgaataaatctaagtggtacaaattaaccaaaattaagctttagttctgttcaatactaaattttaatgaaaagactgctatttaacttttaaaataacaagttgaaactatgctctttgactttgactttgcaacttttatatgatctttgatatccaatcagtgttgactttggtaaaaagtgctgaaaatgctattttacaaaagaaagaagagtaaatggaatctgtagattctattgcctgatgaaagtagacgtgtcaagaaataagaattctccaaggctcttcagataaattcatgtttcatcattttctttgccttcaagttactgagatcatttttggcaagatctgtatcattaatgctgtgttaggaaagaaaagattatgactccacattttactttcaaggttgaagagttaaactgtttaaaaagagtgtatgttatcctgtaaacagcagtatcaggctgtagaatttgtcttctgaaagcagggaacttatatatagcaaagaacttcatagtgctcccatttcttgacaaaacctctcgagaagctcttgattgaaagtcttggctttcatgaatctggcagctttcacaatagtggatttttcatgacaaatcatcttacacagggaattattcaagggttggcacttgaaacagtagaatactttcacaacaagagataagatttctttcaggattgatgacagtcttgcaccctagcgcatactgatgaagagagcagtgggtgaccatgacatggagagcttctgtctttaccagtgccccaatatcagatgtgttgtctggcagtaaggtgtactgtctgcctacagaatactgaggtttcttcaggagaagttttttggtaaagaaactttaccattttgaaagtgttaatgttttctgaagcttccaaaaagattccaaaatgggaatgtttccttgattgtgtcaccatgcttgcatttgatgaaaacttgtagccggctatactgagaaatcatatctgaagaaaggtggtacttccaatctttttgtgacctactttattattgtttttttaatgtcagggttttttttggaatggagaaaagtatttgatagaggtattgcaacagtcttattcttcttcatgctacaagtatatttgactctttctaagatacttgccttcactgttcaactgtgtgactttttgtttgtttagcattacaatcaatatcctagtaggatgatttaatcaatgatttttaattggaacaaatagtttttgtaatggtctaggcttttccaacttaactgtgctctcacatgtggtctctttttctccctctttcctccttcttatacactctcacccacacacatatgcatacataccctgtctgatgtatctgcttcttcagaatagttggctgtgctctgctgatgatgagaacttgccatttaagaaggacttgggatagtccatgtcatcatgttcagggataaaagtaaaacccaagggcatttaaactttattgtattttattttctgtttccagtccaaattaaatccaagagaaggctccataatcaaaaagtaaggacatattttaaatttgccaatgggaagatattctagtcattacagtctggtaatactatcaattctgtttctcttcagaggtgaggggagactatttgatgaaatcgtaagtcctgtagggtgttgtgaaatagggccagaatgaaagatagcaagaatagtgttatgaaaataaaatgcaaagtttataatatcatgtggtaaaatgtaatagtatttacttcatcagtagaactgctctagtagctgtatattctccatccttgcataggttggaatatcccccaagtgaaaagagattgatgggctaatagttaatagaaaatggagatctgtacatacagtgttaagaatgtagatattaaaattgttatatttagctgttacataatattaagactcagagttaagtaatttcactgaaattgattgctttttgtgtcttggagtcaaaataaataactgaaatctactatacttggctcatgcttaattaatatacttagaccatatttcggatgaattattcacagaatctaaaggagtatcctcgtgttcttaccttctttatccctgtgtttatttaaaaaggcaaaaaaaatggagcagatgctgttggttgaccatattttactgaacagtagcatttgtgtttaggttgaaacagcattagaaaactagatacggattaaagtcagtggtaggtttttttttttttttcttccaggaatgtttcttatagatgatcaaacaggcacaggaaggggaagtgttgtgatcaatattatccagttaatattagcattcagaggaaaatttgagtcctctgatacactgttaaatttctttctatactatcaagtccacaaatcctggaactgcaaaagaattttgagactgttcaaaataattaatctctgtataggctcaggctttcctgcaaggttatgaaatgctgataaaattggtcttattttgaaaggctcctcagcttatacctttccttacaaatgcttccttacaaatgctaaagcatttaatgactcctgacttaaagggaatttggacagattgaggttgttggtcttggaaatataatactgcaggcttctgtaaaatacttgaaatgtaattgttttaaaactttcaaagataccacttgtttgcctgttggttagaatactggtgaaataatttttaatctt

SEQ ID NO: 893 - DNA, 4045 bp, Homo sapiens
tgaaagtagacgtgtcaagaaataagaattctccaaggctcttcagataaattcatgtttcatcattttctttgccttcaagttactgagatcatttttggcaagatctgtatcattaatgctgtgttaggaaagaaaagattatgactccacattttactttcaaggttgaagagttaaactgtttaaaaagagtgtatgttatcctgtaaacagcagtatcaggctgtagaatttgtcttctgaaagcagggaacttatatatagcaaagaacttcatagtgctcccatttcttgacaaaacctctcgagaagctcttgattgaaagtcttggctttcatgaatctggcagctttcacaatagtggatttttcatgacaaatcatcttacacagggaattattcaagggttggcacttgaaacagtagaatactttcacaacaagagataagatttctttcaggattgatgacagtcttgcaccctagcgcatactgatgaagagagcagtgggtgaccatgacatggagagcttctgtctttaccagtgccccaatatcagatgtgttgtctggcagtaaggtgtactgtctgcctacagaatactgaggtttcttcaggagaagttttttggtaaagaaactttaccattttgaaagtgttaatgttttctgaagcttccaaaaagattccaaaatgggaatgtttccttgattgtgtcaccatgcttgcatttgatgaaaacttgtagccggctatactgagaaatcatatctgaagaaaggtggtacttccaatctttttgtgacctactttattattgtttttttaatgtcagggttttttttggaatggagaaaagtatttgatagaggtattgcaacagtcttattcttcttcatgctacaagtatatttgactctttctaagatacttgccttcactgttcaactgtgtgactttttgtttgtttagcattacaatcaatatcctagtaggatgatttaatcaatgatttttaattggaacaaatagtttttgtaatggtctaggcttttccaacttaactgtgctctcacatgtggtctctttttctccctctttcctccttcttatacactctcacccacacacatatgcatacataccctgtctgatgtatctgcttcttcagaatagttggctgtgctctgctgatgatgagaacttgccatttaagaaggacttgggatagtccatgtcatcatgttcagggataaaagtaaaacccaagggcatttaaactttattgtattttattttctgtttccagtccaaattaaatccaagagaaggctccataatcaaaaagtaaggacatattttaaatttgccaatgggaagatattctagtcattacagtctggtaatactatcaattctgtttctcttcagaggtgaggggagactatttgatgaaatcgtaagtcctgtagggtgttgtgaaatagggccagaatgaaagatagcaagaatagtgttatgaaaataaaatgcaaagtttataatatcatgtggtaaaatgtaatagtatttacttcatcagtagaactgctctagtagctgtatattctccatccttgcataggttggaatatcccccaagtgaaaagagattgatgggctaatagttaatagaaaatggagatctgtacatacagtgttaagaatgtagatattaaaattgttatatttagctgttacataatattaagactcagagttaagtaatttcactgaaattgattgctttttgtgtcttggagtcaaaataaataactgaaatctactatacttggctcatgcttaattaatatacttagaccatatttcggatgaattattcacagaatctaaaggagtatcctcgtgttcttaccttctttatccctgtgtttatttaaaaaggcaaaaaaaatggagcagatgctgttggttgaccatattttactgaacagtagcatttgtgtttaggttgaaacagcattagaaaactagatacggattaaagtcagtggtaggtttttttttttttttcttccaggaatgtttcttatagatgatcaaacaggcacaggaaggggaagtgttgtgatcaatattatccagttaatattagcattcagaggaaaatttgagtcctctgatacactgttaaatttctttctatactatcaagtccacaaatcctggaactgcaaaagaattttgagactgttcaaaataattaatctctgtataggctcaggctttcctgcaaggttatgaaatgctgataaaattggtcttattttgaaaggctcctcagcttatacctttccttacaaatgcttccttacaaatgctaaagcatttaatgactcctgacttaaagggaatttggacagattgaggttgttggtcttggaaatataatactgcaggcttctgtaaaatacttgaaatgtaattgttttaaaactttcaaagataccacttgtttgcctgttggttagaatactggtgaaataatttttaatcttttatgaataactaatttcatcataagaaaacttagctaagcatggtaaagctgttgttatacaactgtggaattcttcctgaggagtaactatcttataataaatgtagttgattatctaaagtagttttattcttggaatatctcataataggtttattctcttcttgtcagtatttccttgtagattgagcctgtggatttgcatttttgtaattgtgaatcaccattataggagatacatgcattttatctacttttcagtttgtatggggttaactttattagaattatctttaatgttattttgcttatatccttaattttaattatagacaaacattaagaagctggagaaaattatgttctagtgacatttatatagaagaagaatcttttttccccctttcttttttgaagggagatgaggcagtcatattttggtaaagaatttgtagactttgcagaggtctcttcaaaataatctggctcagagtcttgacatatcctcagcagacatggtgcaaattagatggcagagtggtgggtacaagttgaccataaaataacgcattaggttagtaatgcccaaataatactttgggttttcagtgttgcagagaagtcagacaactgatagttattataaagaaaaatgttctgagagtgaggtaaccgcttaagggaaggaagcctccttctgtcttattcactaatttacaagaagataattgtgttacacttccttaggagtcattcatttgtatatttgacacttttgctttatgaacatgtgaagattattcaaaagtaagctgttggtgatttttttcttccaagaaagcatgccacagggcaacttctagggttggttctcatctagtcctgtgctccacactatctgcatctgcacttaagtttcaatattagataactcacatgtttaaactatgaagaaagagttaaaacatcctgagaatgctagtaagtatgtatttttgaaaggacttccaaaatttgagtttaaagaggtaaactccttttacatgacaaagttacttagaaacactactgctgtttccctctcccttgccttctccctgtcccatgcatacccccagctgtgttccagaatgatggcacataaagtaaacattcatatttatttccctttttttgttttttttttttttttttttttttgcttgtttgttttgtttttttgtttgagacagtctcactcaatcacccaggctggagtgcagtggcaacatctcagctcactgcaacctctacctcctgagttcaagcgattctcctgcctcagcctcccgagcagctgggattacaggcgcctgcccccacgcctggctaatttttgtatttttagtagagatggggtttcgccatgttggccagactggtcttgaactcttgacctcaagtgatccgcccacctcggcctcccaaagtgctgagatta

SEQ ID NO: 894 - DNA, 4041 bp, Homo sapiens
atactgagaaatcatatctgaagaaaggtggtacttccaatctttttgtgacctactttattattgtttttttaatgtcagggttttttttggaatggagaaaagtatttgatagaggtattgcaacagtcttattcttcttcatgctacaagtatatttgactctttctaagatacttgccttcactgttcaactgtgtgactttttgtttgtttagcattacaatcaatatcctagtaggatgatttaatcaatgatttttaattggaacaaatagtttttgtaatggtctaggcttttccaacttaactgtgctctcacatgtggtctctttttctccctctttcctccttcttatacactctcacccacacacatatgcatacataccctgtctgatgtatctgcttcttcagaatagttggctgtgctctgctgatgatgagaacttgccatttaagaaggacttgggatagtccatgtcatcatgttcagggataaaagtaaaacccaagggcatttaaactttattgtattttattttctgtttccagtccaaattaaatccaagagaaggctccataatcaaaaagtaaggacatattttaaatttgccaatgggaagatattctagtcattacagtctggtaatactatcaattctgtttctcttcagaggtgaggggagactatttgatgaaatcgtaagtcctgtagggtgttgtgaaatagggccagaatgaaagatagcaagaatagtgttatgaaaataaaatgcaaagtttataatatcatgtggtaaaatgtaatagtatttacttcatcagtagaactgctctagtagctgtatattctccatccttgcataggttggaatatcccccaagtgaaaagagattgatgggctaatagttaatagaaaatggagatctgtacatacagtgttaagaatgtagatattaaaattgttatatttagctgttacataatattaagactcagagttaagtaatttcactgaaattgattgctttttgtgtcttggagtcaaaataaataactgaaatctactatacttggctcatgcttaattaatatacttagaccatatttcggatgaattattcacagaatctaaaggagtatcctcgtgttcttaccttctttatccctgtgtttatttaaaaaggcaaaaaaaatggagcagatgctgttggttgaccatattttactgaacagtagcatttgtgtttaggttgaaacagcattagaaaactagatacggattaaagtcagtggtaggtttttttttttttttcttccaggaatgtttcttatagatgatcaaacaggcacaggaaggggaagtgttgtgatcaatattatccagttaatattagcattcagaggaaaatttgagtcctctgatacactgttaaatttctttctatactatcaagtccacaaatcctggaactgcaaaagaattttgagactgttcaaaataattaatctctgtataggctcaggctttcctgcaaggttatgaaatgctgataaaattggtcttattttgaaaggctcctcagcttatacctttccttacaaatgcttccttacaaatgctaaagcatttaatgactcctgacttaaagggaatttggacagattgaggttgttggtcttggaaatataatactgcaggcttctgtaaaatacttgaaatgtaattgttttaaaactttcaaagataccacttgtttgcctgttggttagaatactggtgaaataatttttaatcttttatgaataactaatttcatcataagaaaacttagctaagcatggtaaagctgttgttatacaactgtggaattcttcctgaggagtaactatcttataataaatgtagttgattatctaaagtagttttattcttggaatatctcataataggtttattctcttcttgtcagtatttccttgtagattgagcctgtggatttgcatttttgtaattgtgaatcaccattataggagatacatgcattttatctacttttcagtttgtatggggttaactttattagaattatctttaatgttattttgcttatatccttaattttaattatagacaaacattaagaagctggagaaaattatgttctagtgacatttatatagaagaagaatcttttttccccctttcttttttgaagggagatgaggcagtcatattttggtaaagaatttgtagactttgcagaggtctcttcaaaataatctggctcagagtcttgacatatcctcagcagacatggtgcaaattagatggcagagtggtgggtacaagttgaccataaaataacgcattaggttagtaatgcccaaataatactttgggttttcagtgttgcagagaagtcagacaactgatagttattataaagaaaaatgttctgagagtgaggtaaccgcttaagggaaggaagcctccttctgtcttattcactaatttacaagaagataattgtgttacacttccttaggagtcattcatttgtatatttgacacttttgctttatgaacatgtgaagattattcaaaagtaagctgttggtgatttttttcttccaagaaagcatgccacagggcaacttctagggttggttctcatctagtcctgtgctccacactatctgcatctgcacttaagtttcaatattagataactcacatgtttaaactatgaagaaagagttaaaacatcctgagaatgctagtaagtatgtatttttgaaaggacttccaaaatttgagtttaaagaggtaaactccttttacatgacaaagttacttagaaacactactgctgtttccctctcccttgccttctccctgtcccatgcatacccccagctgtgttccagaatgatggcacataaagtaaacattcatatttatttccctttttttgttttttttttttttttttttttttgcttgtttgttttgtttttttgtttgagacagtctcactcaatcacccaggctggagtgcagtggcaacatctcagctcactgcaacctctacctcctgagttcaagcgattctcctgcctcagcctcccgagcagctgggattacaggcgcctgcccccacgcctggctaatttttgtatttttagtagagatggggtttcgccatgttggccagactggtcttgaactcttgacctcaagtgatccgcccacctcggcctcccaaagtgctgagattacaggcatgagtcactgtgcctggcctcttattttttctttggttaaacttttagggaaaaagtttgagctgcttttaattttctttttgtttttaaataaattattaaagtttctctatgttaggaactcttgtgtacatgagttcattgagcttattcttaataaagacaaatcttctagaaataatagttgtatctttaaatgatctcaaggaaaatgtttggtttctctggggaatgaattttcatgacctaatcttaaatcaggttattttttctagcctgtttactaaatttctacatgttataacctaatgaaattttcttacttcctctttatttaaaacaaactataattactgtctttttaaaaatcttccaatgtggcgttcttatttttcttaacatttgaattttcctgggccaaaccatgttactatgatacacattatttaaggctgttatataatacagtaaaattgtagaactttcataccttgaaggatcttagcaattatttaattcaaacccattctaacatagatgataaaacagatttgcagggttgggcacggtggctcatacctatattcccagcactttgggagactcaagcgggaagattgcttgagcccaggagttcaagaccagcttgggcaacatagtgagaggctgtctctacaaaaaaatatttaaaaaatagccgggcatggtgtcacgtgcctgtagttccagctgcttgggaggctgaggtg

SEQ ID NO: 895 - DNA, 4043 bp, Homo sapiens
ctctgctgatgatgagaacttgccatttaagaaggacttgggatagtccatgtcatcatgttcagggataaaagtaaaacccaagggcatttaaactttattgtattttattttctgtttccagtccaaattaaatccaagagaaggctccataatcaaaaagtaaggacatattttaaatttgccaatgggaagatattctagtcattacagtctggtaatactatcaattctgtttctcttcagaggtgaggggagactatttgatgaaatcgtaagtcctgtagggtgttgtgaaatagggccagaatgaaagatagcaagaatagtgttatgaaaataaaatgcaaagtttataatatcatgtggtaaaatgtaatagtatttacttcatcagtagaactgctctagtagctgtatattctccatccttgcataggttggaatatcccccaagtgaaaagagattgatgggctaatagttaatagaaaatggagatctgtacatacagtgttaagaatgtagatattaaaattgttatatttagctgttacataatattaagactcagagttaagtaatttcactgaaattgattgctttttgtgtcttggagtcaaaataaataactgaaatctactatacttggctcatgcttaattaatatacttagaccatatttcggatgaattattcacagaatctaaaggagtatcctcgtgttcttaccttctttatccctgtgtttatttaaaaaggcaaaaaaaatggagcagatgctgttggttgaccatattttactgaacagtagcatttgtgtttaggttgaaacagcattagaaaactagatacggattaaagtcagtggtaggtttttttttttttttcttccaggaatgtttcttatagatgatcaaacaggcacaggaaggggaagtgttgtgatcaatattatccagttaatattagcattcagaggaaaatttgagtcctctgatacactgttaaatttctttctatactatcaagtccacaaatcctggaactgcaaaagaattttgagactgttcaaaataattaatctctgtataggctcaggctttcctgcaaggttatgaaatgctgataaaattggtcttattttgaaaggctcctcagcttatacctttccttacaaatgcttccttacaaatgctaaagcatttaatgactcctgacttaaagggaatttggacagattgaggttgttggtcttggaaatataatactgcaggcttctgtaaaatacttgaaatgtaattgttttaaaactttcaaagataccacttgtttgcctgttggttagaatactggtgaaataatttttaatcttttatgaataactaatttcatcataagaaaacttagctaagcatggtaaagctgttgttatacaactgtggaattcttcctgaggagtaactatcttataataaatgtagttgattatctaaagtagttttattcttggaatatctcataataggtttattctcttcttgtcagtatttccttgtagattgagcctgtggatttgcatttttgtaattgtgaatcaccattataggagatacatgcattttatctacttttcagtttgtatggggttaactttattagaattatctttaatgttattttgcttatatccttaattttaattatagacaaacattaagaagctggagaaaattatgttctagtgacatttatatagaagaagaatcttttttccccctttcttttttgaagggagatgaggcagtcatattttggtaaagaatttgtagactttgcagaggtctcttcaaaataatctggctcagagtcttgacatatcctcagcagacatggtgcaaattagatggcagagtggtgggtacaagttgaccataaaataacgcattaggttagtaatgcccaaataatactttgggttttcagtgttgcagagaagtcagacaactgatagttattataaagaaaaatgttctgagagtgaggtaaccgcttaagggaaggaagcctccttctgtcttattcactaatttacaagaagataattgtgttacacttccttaggagtcattcatttgtatatttgacacttttgctttatgaacatgtgaagattattcaaaagtaagctgttggtgatttttttcttccaagaaagcatgccacagggcaacttctagggttggttctcatctagtcctgtgctccacactatctgcatctgcacttaagtttcaatattagataactcacatgtttaaactatgaagaaagagttaaaacatcctgagaatgctagtaagtatgtatttttgaaaggacttccaaaatttgagtttaaagaggtaaactccttttacatgacaaagttacttagaaacactactgctgtttccctctcccttgccttctccctgtcccatgcatacccccagctgtgttccagaatgatggcacataaagtaaacattcatatttatttccctttttttgttttttttttttttttttttttttgcttgtttgttttgtttttttgtttgagacagtctcactcaatcacccaggctggagtgcagtggcaacatctcagctcactgcaacctctacctcctgagttcaagcgattctcctgcctcagcctcccgagcagctgggattacaggcgcctgcccccacgcctggctaatttttgtatttttagtagagatggggtttcgccatgttggccagactggtcttgaactcttgacctcaagtgatccgcccacctcggcctcccaaagtgctgagattacaggcatgagtcactgtgcctggcctcttattttttctttggttaaacttttagggaaaaagtttgagctgcttttaattttctttttgtttttaaataaattattaaagtttctctatgttaggaactcttgtgtacatgagttcattgagcttattcttaataaagacaaatcttctagaaataatagttgtatctttaaatgatctcaaggaaaatgtttggtttctctggggaatgaattttcatgacctaatcttaaatcaggttattttttctagcctgtttactaaatttctacatgttataacctaatgaaattttcttacttcctctttatttaaaacaaactataattactgtctttttaaaaatcttccaatgtggcgttcttatttttcttaacatttgaattttcctgggccaaaccatgttactatgatacacattatttaaggctgttatataatacagtaaaattgtagaactttcataccttgaaggatcttagcaattatttaattcaaacccattctaacatagatgataaaacagatttgcagggttgggcacggtggctcatacctatattcccagcactttgggagactcaagcgggaagattgcttgagcccaggagttcaagaccagcttgggcaacatagtgagaggctgtctctacaaaaaaatatttaaaaaatagccgggcatggtgtcacgtgcctgtagttccagctgcttgggaggctgaggtgggaggattgccagagcctgggaggttgaggctgcagtgagccatgatcacaccacagcactctagcctagagcctccctgtgtggcaggctctacacttcagataggcaacagatcgagaccttgtttcacaaaacgaacagatctgcaaagatcaacctgtcctaagtcatataatctctttgtgtaataataaaaaccccatcttctaaccttaaacctggtatttttttctacgaaactatgttctgcagtccaaattatttttctttattattttgaatcctaaagtagaaatagaaacttagaaaaataaaaagcaactcctttatgacatatgaggactttttcagttttaaataagaaaaacccaactcaaagtagcttaaataaaaggagacattttttgacttacataacctaaaagctctggc

SEQ ID NO: 896 - DNA, 4038 bp, Homo sapiens
gttgtgaaatagggccagaatgaaagatagcaagaatagtgttatgaaaataaaatgcaaagtttataatatcatgtggtaaaatgtaatagtatttacttcatcagtagaactgctctagtagctgtatattctccatccttgcataggttggaatatcccccaagtgaaaagagattgatgggctaatagttaatagaaaatggagatctgtacatacagtgttaagaatgtagatattaaaattgttatatttagctgttacataatattaagactcagagttaagtaatttcactgaaattgattgctttttgtgtcttggagtcaaaataaataactgaaatctactatacttggctcatgcttaattaatatacttagaccatatttcggatgaattattcacagaatctaaaggagtatcctcgtgttcttaccttctttatccctgtgtttatttaaaaaggcaaaaaaaatggagcagatgctgttggttgaccatattttactgaacagtagcatttgtgtttaggttgaaacagcattagaaaactagatacggattaaagtcagtggtaggtttttttttttttttcttccaggaatgtttcttatagatgatcaaacaggcacaggaaggggaagtgttgtgatcaatattatccagttaatattagcattcagaggaaaatttgagtcctctgatacactgttaaatttctttctatactatcaagtccacaaatcctggaactgcaaaagaattttgagactgttcaaaataattaatctctgtataggctcaggctttcctgcaaggttatgaaatgctgataaaattggtcttattttgaaaggctcctcagcttatacctttccttacaaatgcttccttacaaatgctaaagcatttaatgactcctgacttaaagggaatttggacagattgaggttgttggtcttggaaatataatactgcaggcttctgtaaaatacttgaaatgtaattgttttaaaactttcaaagataccacttgtttgcctgttggttagaatactggtgaaataatttttaatcttttatgaataactaatttcatcataagaaaacttagctaagcatggtaaagctgttgttatacaactgtggaattcttcctgaggagtaactatcttataataaatgtagttgattatctaaagtagttttattcttggaatatctcataataggtttattctcttcttgtcagtatttccttgtagattgagcctgtggatttgcatttttgtaattgtgaatcaccattataggagatacatgcattttatctacttttcagtttgtatggggttaactttattagaattatctttaatgttattttgcttatatccttaattttaattatagacaaacattaagaagctggagaaaattatgttctagtgacatttatatagaagaagaatcttttttccccctttcttttttgaagggagatgaggcagtcatattttggtaaagaatttgtagactttgcagaggtctcttcaaaataatctggctcagagtcttgacatatcctcagcagacatggtgcaaattagatggcagagtggtgggtacaagttgaccataaaataacgcattaggttagtaatgcccaaataatactttgggttttcagtgttgcagagaagtcagacaactgatagttattataaagaaaaatgttctgagagtgaggtaaccgcttaagggaaggaagcctccttctgtcttattcactaatttacaagaagataattgtgttacacttccttaggagtcattcatttgtatatttgacacttttgctttatgaacatgtgaagattattcaaaagtaagctgttggtgatttttttcttccaagaaagcatgccacagggcaacttctagggttggttctcatctagtcctgtgctccacactatctgcatctgcacttaagtttcaatattagataactcacatgtttaaactatgaagaaagagttaaaacatcctgagaatgctagtaagtatgtatttttgaaaggacttccaaaatttgagtttaaagaggtaaactccttttacatgacaaagttacttagaaacactactgctgtttccctctcccttgccttctccctgtcccatgcatacccccagctgtgttccagaatgatggcacataaagtaaacattcatatttatttccctttttttgttttttttttttttttttttttttgcttgtttgttttgtttttttgtttgagacagtctcactcaatcacccaggctggagtgcagtggcaacatctcagctcactgcaacctctacctcctgagttcaagcgattctcctgcctcagcctcccgagcagctgggattacaggcgcctgcccccacgcctggctaatttttgtatttttagtagagatggggtttcgccatgttggccagactggtcttgaactcttgacctcaagtgatccgcccacctcggcctcccaaagtgctgagattacaggcatgagtcactgtgcctggcctcttattttttctttggttaaacttttagggaaaaagtttgagctgcttttaattttctttttgtttttaaataaattattaaagtttctctatgttaggaactcttgtgtacatgagttcattgagcttattcttaataaagacaaatcttctagaaataatagttgtatctttaaatgatctcaaggaaaatgtttggtttctctggggaatgaattttcatgacctaatcttaaatcaggttattttttctagcctgtttactaaatttctacatgttataacctaatgaaattttcttacttcctctttatttaaaacaaactataattactgtctttttaaaaatcttccaatgtggcgttcttatttttcttaacatttgaattttcctgggccaaaccatgttactatgatacacattatttaaggctgttatataatacagtaaaattgtagaactttcataccttgaaggatcttagcaattatttaattcaaacccattctaacatagatgataaaacagatttgcagggttgggcacggtggctcatacctatattcccagcactttgggagactcaagcgggaagattgcttgagcccaggagttcaagaccagcttgggcaacatagtgagaggctgtctctacaaaaaaatatttaaaaaatagccgggcatggtgtcacgtgcctgtagttccagctgcttgggaggctgaggtgggaggattgccagagcctgggaggttgaggctgcagtgagccatgatcacaccacagcactctagcctagagcctccctgtgtggcaggctctacacttcagataggcaacagatcgagaccttgtttcacaaaacgaacagatctgcaaagatcaacctgtcctaagtcatataatctctttgtgtaataataaaaaccccatcttctaaccttaaacctggtatttttttctacgaaactatgttctgcagtccaaattatttttctttattattttgaatcctaaagtagaaatagaaacttagaaaaataaaaagcaactcctttatgacatatgaggactttttcagttttaaataagaaaaacccaactcaaagtagcttaaataaaaggagacattttttgacttacataacctaaaagctctggcctggatctaggtgctcaacagatctcaagagtatctctcttattctctctccctcccttaccctcctcctcttttctctcttctgtatatatgttattttcaaacaggctctcacaagtagtggcaagatatagttcctaatagcttcaggtttgcattctacctactttagcaactatgatgagaagagagctacaatttgagcaaaaatttgtagggtgagttctgatttccctggattgaggcacatgcctattattcctgaaccaaatattctgtccaggg

SEQ ID NO: 897 - DNA, 4045 bp, Homo sapiens
ggttatgaaatgctgataaaattggtcttattttgaaaggctcctcagcttatacctttccttacaaatgcttccttacaaatgctaaagcatttaatgactcctgacttaaagggaatttggacagattgaggttgttggtcttggaaatataatactgcaggcttctgtaaaatacttgaaatgtaattgttttaaaactttcaaagataccacttgtttgcctgttggttagaatactggtgaaataatttttaatcttttatgaataactaatttcatcataagaaaacttagctaagcatggtaaagctgttgttatacaactgtggaattcttcctgaggagtaactatcttataataaatgtagttgattatctaaagtagttttattcttggaatatctcataataggtttattctcttcttgtcagtatttccttgtagattgagcctgtggatttgcatttttgtaattgtgaatcaccattataggagatacatgcattttatctacttttcagtttgtatggggttaactttattagaattatctttaatgttattttgcttatatccttaattttaattatagacaaacattaagaagctggagaaaattatgttctagtgacatttatatagaagaagaatcttttttccccctttcttttttgaagggagatgaggcagtcatattttggtaaagaatttgtagactttgcagaggtctcttcaaaataatctggctcagagtcttgacatatcctcagcagacatggtgcaaattagatggcagagtggtgggtacaagttgaccataaaataacgcattaggttagtaatgcccaaataatactttgggttttcagtgttgcagagaagtcagacaactgatagttattataaagaaaaatgttctgagagtgaggtaaccgcttaagggaaggaagcctccttctgtcttattcactaatttacaagaagataattgtgttacacttccttaggagtcattcatttgtatatttgacacttttgctttatgaacatgtgaagattattcaaaagtaagctgttggtgatttttttcttccaagaaagcatgccacagggcaacttctagggttggttctcatctagtcctgtgctccacactatctgcatctgcacttaagtttcaatattagataactcacatgtttaaactatgaagaaagagttaaaacatcctgagaatgctagtaagtatgtatttttgaaaggacttccaaaatttgagtttaaagaggtaaactccttttacatgacaaagttacttagaaacactactgctgtttccctctcccttgccttctccctgtcccatgcatacccccagctgtgttccagaatgatggcacataaagtaaacattcatatttatttccctttttttgttttttttttttttttttttttttgcttgtttgttttgtttttttgtttgagacagtctcactcaatcacccaggctggagtgcagtggcaacatctcagctcactgcaacctctacctcctgagttcaagcgattctcctgcctcagcctcccgagcagctgggattacaggcgcctgcccccacgcctggctaatttttgtatttttagtagagatggggtttcgccatgttggccagactggtcttgaactcttgacctcaagtgatccgcccacctcggcctcccaaagtgctgagattacaggcatgagtcactgtgcctggcctcttattttttctttggttaaacttttagggaaaaagtttgagctgcttttaattttctttttgtttttaaataaattattaaagtttctctatgttaggaactcttgtgtacatgagttcattgagcttattcttaataaagacaaatcttctagaaataatagttgtatctttaaatgatctcaaggaaaatgtttggtttctctggggaatgaattttcatgacctaatcttaaatcaggttattttttctagcctgtttactaaatttctacatgttataacctaatgaaattttcttacttcctctttatttaaaacaaactataattactgtctttttaaaaatcttccaatgtggcgttcttatttttcttaacatttgaattttcctgggccaaaccatgttactatgatacacattatttaaggctgttatataatacagtaaaattgtagaactttcataccttgaaggatcttagcaattatttaattcaaacccattctaacatagatgataaaacagatttgcagggttgggcacggtggctcatacctatattcccagcactttgggagactcaagcgggaagattgcttgagcccaggagttcaagaccagcttgggcaacatagtgagaggctgtctctacaaaaaaatatttaaaaaatagccgggcatggtgtcacgtgcctgtagttccagctgcttgggaggctgaggtgggaggattgccagagcctgggaggttgaggctgcagtgagccatgatcacaccacagcactctagcctagagcctccctgtgtggcaggctctacacttcagataggcaacagatcgagaccttgtttcacaaaacgaacagatctgcaaagatcaacctgtcctaagtcatataatctctttgtgtaataataaaaaccccatcttctaaccttaaacctggtatttttttctacgaaactatgttctgcagtccaaattatttttctttattattttgaatcctaaagtagaaatagaaacttagaaaaataaaaagcaactcctttatgacatatgaggactttttcagttttaaataagaaaaacccaactcaaagtagcttaaataaaaggagacattttttgacttacataacctaaaagctctggcctggatctaggtgctcaacagatctcaagagtatctctcttattctctctccctcccttaccctcctcctcttttctctcttctgtatatatgttattttcaaacaggctctcacaagtagtggcaagatatagttcctaatagcttcaggtttgcattctacctactttagcaactatgatgagaagagagctacaatttgagcaaaaatttgtagggtgagttctgatttccctggattgaggcacatgcctattattcctgaaccaaatattctgtccagggaatggaattctctggggcatgtatctaaagctgaagtgtagagcctgccacacagggataataatagttttccaaagaaaaatcaaggaggggaaagaatgttggaaagagaaaaaaatatcagttgtctgcttcacatttgttctcaataattagtttcatagaagtgaaatactgtgtaacaccctaaactttagagattcttcgtagacaggaaaaataagaactcaatgaagttgtgacttcattcaaatcacgtagtttatatacatgctattagtaaaacccaggacagctgagtacaagttttacccttatattcacattgaggtccagatcctggttttgaatgagataattacgtgcagtcggactgttttctgatcctaaaaatagagacaataatatctatcttgtaaagttatggtagtgttaaagatatataaaatgttggcaagtaccttaatatacaataactactgctatatgttgtcattgtaataataatcatatttcttcctttgttgaattgctttcctgtagtaatcttattgtgatcatcctgaaacatagatttccgagcttcaagcaaacactattatgttgaaaaatctacattatttctaagtttagcagtgccagtggaaagtttattgaaatagaaaattacttttttaactgaggagtgtagattgtgaattcgtgattcatcttcttaggagatgatcggaatattgataaatattgatgcatagaatatgaacaaaacattacatatcttgtgctgtgatattaaagtagtattctgttctggtagtagtatggcag

SEQ ID NO: 898 - DNA, 4047 bp, Homo sapiens
taggttagtaatgcccaaataatactttgggttttcagtgttgcagagaagtcagacaactgatagttattataaagaaaaatgttctgagagtgaggtaaccgcttaagggaaggaagcctccttctgtcttattcactaatttacaagaagataattgtgttacacttccttaggagtcattcatttgtatatttgacacttttgctttatgaacatgtgaagattattcaaaagtaagctgttggtgatttttttcttccaagaaagcatgccacagggcaacttctagggttggttctcatctagtcctgtgctccacactatctgcatctgcacttaagtttcaatattagataactcacatgtttaaactatgaagaaagagttaaaacatcctgagaatgctagtaagtatgtatttttgaaaggacttccaaaatttgagtttaaagaggtaaactccttttacatgacaaagttacttagaaacactactgctgtttccctctcccttgccttctccctgtcccatgcatacccccagctgtgttccagaatgatggcacataaagtaaacattcatatttatttccctttttttgttttttttttttttttttttttttgcttgtttgttttgtttttttgtttgagacagtctcactcaatcacccaggctggagtgcagtggcaacatctcagctcactgcaacctctacctcctgagttcaagcgattctcctgcctcagcctcccgagcagctgggattacaggcgcctgcccccacgcctggctaatttttgtatttttagtagagatggggtttcgccatgttggccagactggtcttgaactcttgacctcaagtgatccgcccacctcggcctcccaaagtgctgagattacaggcatgagtcactgtgcctggcctcttattttttctttggttaaacttttagggaaaaagtttgagctgcttttaattttctttttgtttttaaataaattattaaagtttctctatgttaggaactcttgtgtacatgagttcattgagcttattcttaataaagacaaatcttctagaaataatagttgtatctttaaatgatctcaaggaaaatgtttggtttctctggggaatgaattttcatgacctaatcttaaatcaggttattttttctagcctgtttactaaatttctacatgttataacctaatgaaattttcttacttcctctttatttaaaacaaactataattactgtctttttaaaaatcttccaatgtggcgttcttatttttcttaacatttgaattttcctgggccaaaccatgttactatgatacacattatttaaggctgttatataatacagtaaaattgtagaactttcataccttgaaggatcttagcaattatttaattcaaacccattctaacatagatgataaaacagatttgcagggttgggcacggtggctcatacctatattcccagcactttgggagactcaagcgggaagattgcttgagcccaggagttcaagaccagcttgggcaacatagtgagaggctgtctctacaaaaaaatatttaaaaaatagccgggcatggtgtcacgtgcctgtagttccagctgcttgggaggctgaggtgggaggattgccagagcctgggaggttgaggctgcagtgagccatgatcacaccacagcactctagcctagagcctccctgtgtggcaggctctacacttcagataggcaacagatcgagaccttgtttcacaaaacgaacagatctgcaaagatcaacctgtcctaagtcatataatctctttgtgtaataataaaaaccccatcttctaaccttaaacctggtatttttttctacgaaactatgttctgcagtccaaattatttttctttattattttgaatcctaaagtagaaatagaaacttagaaaaataaaaagcaactcctttatgacatatgaggactttttcagttttaaataagaaaaacccaactcaaagtagcttaaataaaaggagacattttttgacttacataacctaaaagctctggcctggatctaggtgctcaacagatctcaagagtatctctcttattctctctccctcccttaccctcctcctcttttctctcttctgtatatatgttattttcaaacaggctctcacaagtagtggcaagatatagttcctaatagcttcaggtttgcattctacctactttagcaactatgatgagaagagagctacaatttgagcaaaaatttgtagggtgagttctgatttccctggattgaggcacatgcctattattcctgaaccaaatattctgtccagggaatggaattctctggggcatgtatctaaagctgaagtgtagagcctgccacacagggataataatagttttccaaagaaaaatcaaggaggggaaagaatgttggaaagagaaaaaaatatcagttgtctgcttcacatttgttctcaataattagtttcatagaagtgaaatactgtgtaacaccctaaactttagagattcttcgtagacaggaaaaataagaactcaatgaagttgtgacttcattcaaatcacgtagtttatatacatgctattagtaaaacccaggacagctgagtacaagttttacccttatattcacattgaggtccagatcctggttttgaatgagataattacgtgcagtcggactgttttctgatcctaaaaatagagacaataatatctatcttgtaaagttatggtagtgttaaagatatataaaatgttggcaagtaccttaatatacaataactactgctatatgttgtcattgtaataataatcatatttcttcctttgttgaattgctttcctgtagtaatcttattgtgatcatcctgaaacatagatttccgagcttcaagcaaacactattatgttgaaaaatctacattatttctaagtttagcagtgccagtggaaagtttattgaaatagaaaattacttttttaactgaggagtgtagattgtgaattcgtgattcatcttcttaggagatgatcggaatattgataaatattgatgcatagaatatgaacaaaacattacatatcttgtgctgtgatattaaagtagtattctgttctggtagtagtatggcagtattttaggtctgaaagatgtacataatctgtactttgaagtctgttttttaagagattaatcacaagagatttacataaaacaactaaggttaaaaataaatggtggattagagatacatcaggcaaatttcaatttcaaaagcagatgacagaatctcagtatcagggtagcatttaaagcaaaaagcattaaactggatcaaaaatgtcattttacatcaacacagggtacactccaggtaaagacttaacagttatgaacgaatgtgctaaacatcaaaatgtattaagtaaaagctgaaagaaatgaagaataattggtagaaaagcaatgataggaatccttaatgtacttcaaaaggcacgaagtaagaaggtacagtcatgtaccacataatgatgtttgagtcaacacctgacctggtatacgacaatggtcctataaaattataatggagctaaaaagcttctatcacctagtgatgttgaagccgttgcaatgcaatgtatcactcacatgtttgtggtaatgctggtgtaagcaaacttactgtactgtcagttgtataaaagcatagcacagttatgttcagcacataatactttataatgataaacgaatatgttactagtttacgtgtttacagtactattattttagcatgtgcttctgcttattaaaaaatgttaactataaaataatctttaggcagatcctacaggaggtattccagataaaggcattattgtcataggagatggcagctccatggatgttattgccccttaagaccttccagtgggacaagatgtataggtggaagacagtgatatt

SEQ ID NO: 899 - DNA, 4043 bp, Homo sapiens
ggacttccaaaatttgagtttaaagaggtaaactccttttacatgacaaagttacttagaaacactactgctgtttccctctcccttgccttctccctgtcccatgcatacccccagctgtgttccagaatgatggcacataaagtaaacattcatatttatttccctttttttgttttttttttttttttttttttttgcttgtttgttttgtttttttgtttgagacagtctcactcaatcacccaggctggagtgcagtggcaacatctcagctcactgcaacctctacctcctgagttcaagcgattctcctgcctcagcctcccgagcagctgggattacaggcgcctgcccccacgcctggctaatttttgtatttttagtagagatggggtttcgccatgttggccagactggtcttgaactcttgacctcaagtgatccgcccacctcggcctcccaaagtgctgagattacaggcatgagtcactgtgcctggcctcttattttttctttggttaaacttttagggaaaaagtttgagctgcttttaattttctttttgtttttaaataaattattaaagtttctctatgttaggaactcttgtgtacatgagttcattgagcttattcttaataaagacaaatcttctagaaataatagttgtatctttaaatgatctcaaggaaaatgtttggtttctctggggaatgaattttcatgacctaatcttaaatcaggttattttttctagcctgtttactaaatttctacatgttataacctaatgaaattttcttacttcctctttatttaaaacaaactataattactgtctttttaaaaatcttccaatgtggcgttcttatttttcttaacatttgaattttcctgggccaaaccatgttactatgatacacattatttaaggctgttatataatacagtaaaattgtagaactttcataccttgaaggatcttagcaattatttaattcaaacccattctaacatagatgataaaacagatttgcagggttgggcacggtggctcatacctatattcccagcactttgggagactcaagcgggaagattgcttgagcccaggagttcaagaccagcttgggcaacatagtgagaggctgtctctacaaaaaaatatttaaaaaatagccgggcatggtgtcacgtgcctgtagttccagctgcttgggaggctgaggtgggaggattgccagagcctgggaggttgaggctgcagtgagccatgatcacaccacagcactctagcctagagcctccctgtgtggcaggctctacacttcagataggcaacagatcgagaccttgtttcacaaaacgaacagatctgcaaagatcaacctgtcctaagtcatataatctctttgtgtaataataaaaaccccatcttctaaccttaaacctggtatttttttctacgaaactatgttctgcagtccaaattatttttctttattattttgaatcctaaagtagaaatagaaacttagaaaaataaaaagcaactcctttatgacatatgaggactttttcagttttaaataagaaaaacccaactcaaagtagcttaaataaaaggagacattttttgacttacataacctaaaagctctggcctggatctaggtgctcaacagatctcaagagtatctctcttattctctctccctcccttaccctcctcctcttttctctcttctgtatatatgttattttcaaacaggctctcacaagtagtggcaagatatagttcctaatagcttcaggtttgcattctacctactttagcaactatgatgagaagagagctacaatttgagcaaaaatttgtagggtgagttctgatttccctggattgaggcacatgcctattattcctgaaccaaatattctgtccagggaatggaattctctggggcatgtatctaaagctgaagtgtagagcctgccacacagggataataatagttttccaaagaaaaatcaaggaggggaaagaatgttggaaagagaaaaaaatatcagttgtctgcttcacatttgttctcaataattagtttcatagaagtgaaatactgtgtaacaccctaaactttagagattcttcgtagacaggaaaaataagaactcaatgaagttgtgacttcattcaaatcacgtagtttatatacatgctattagtaaaacccaggacagctgagtacaagttttacccttatattcacattgaggtccagatcctggttttgaatgagataattacgtgcagtcggactgttttctgatcctaaaaatagagacaataatatctatcttgtaaagttatggtagtgttaaagatatataaaatgttggcaagtaccttaatatacaataactactgctatatgttgtcattgtaataataatcatatttcttcctttgttgaattgctttcctgtagtaatcttattgtgatcatcctgaaacatagatttccgagcttcaagcaaacactattatgttgaaaaatctacattatttctaagtttagcagtgccagtggaaagtttattgaaatagaaaattacttttttaactgaggagtgtagattgtgaattcgtgattcatcttcttaggagatgatcggaatattgataaatattgatgcatagaatatgaacaaaacattacatatcttgtgctgtgatattaaagtagtattctgttctggtagtagtatggcagtattttaggtctgaaagatgtacataatctgtactttgaagtctgttttttaagagattaatcacaagagatttacataaaacaactaaggttaaaaataaatggtggattagagatacatcaggcaaatttcaatttcaaaagcagatgacagaatctcagtatcagggtagcatttaaagcaaaaagcattaaactggatcaaaaatgtcattttacatcaacacagggtacactccaggtaaagacttaacagttatgaacgaatgtgctaaacatcaaaatgtattaagtaaaagctgaaagaaatgaagaataattggtagaaaagcaatgataggaatccttaatgtacttcaaaaggcacgaagtaagaaggtacagtcatgtaccacataatgatgtttgagtcaacacctgacctggtatacgacaatggtcctataaaattataatggagctaaaaagcttctatcacctagtgatgttgaagccgttgcaatgcaatgtatcactcacatgtttgtggtaatgctggtgtaagcaaacttactgtactgtcagttgtataaaagcatagcacagttatgttcagcacataatactttataatgataaacgaatatgttactagtttacgtgtttacagtactattattttagcatgtgcttctgcttattaaaaaatgttaactataaaataatctttaggcagatcctacaggaggtattccagataaaggcattattgtcataggagatggcagctccatggatgttattgccccttaagaccttccagtgggacaagatgtataggtggaagacagtgatattgatgatcctgaccttgtagaggccaaggctaaagtatgtatttattagtttttaacaagagtttaaaaagtaaaaaaaaaaaataaatttaaaaatagaaaaaatcttaataaggatacaaagaaaaaatgtttttgtgtagctgtgtaatatgtttttgttttaagttaaatgttacaaaagagtcagagttaaatttttttatatttataaagtgaaaaagttataaaatgctaaggttaatttactgaagaaagaaaaaatttttaaacagatttagagtagcatgtttataaaatctacagtagtttacagtaatatcctaggccttcacattaactcaccactcacccactgactcacccagagcagcttccaatcctgtaagctccattcgtggtaagtgccctatacaggtgtacaatt

SEQ ID NO: 900 - DNA, 4052 bp, Homo sapiens
ccacctcggcctcccaaagtgctgagattacaggcatgagtcactgtgcctggcctcttattttttctttggttaaacttttagggaaaaagtttgagctgcttttaattttctttttgtttttaaataaattattaaagtttctctatgttaggaactcttgtgtacatgagttcattgagcttattcttaataaagacaaatcttctagaaataatagttgtatctttaaatgatctcaaggaaaatgtttggtttctctggggaatgaattttcatgacctaatcttaaatcaggttattttttctagcctgtttactaaatttctacatgttataacctaatgaaattttcttacttcctctttatttaaaacaaactataattactgtctttttaaaaatcttccaatgtggcgttcttatttttcttaacatttgaattttcctgggccaaaccatgttactatgatacacattatttaaggctgttatataatacagtaaaattgtagaactttcataccttgaaggatcttagcaattatttaattcaaacccattctaacatagatgataaaacagatttgcagggttgggcacggtggctcatacctatattcccagcactttgggagactcaagcgggaagattgcttgagcccaggagttcaagaccagcttgggcaacatagtgagaggctgtctctacaaaaaaatatttaaaaaatagccgggcatggtgtcacgtgcctgtagttccagctgcttgggaggctgaggtgggaggattgccagagcctgggaggttgaggctgcagtgagccatgatcacaccacagcactctagcctagagcctccctgtgtggcaggctctacacttcagataggcaacagatcgagaccttgtttcacaaaacgaacagatctgcaaagatcaacctgtcctaagtcatataatctctttgtgtaataataaaaaccccatcttctaaccttaaacctggtatttttttctacgaaactatgttctgcagtccaaattatttttctttattattttgaatcctaaagtagaaatagaaacttagaaaaataaaaagcaactcctttatgacatatgaggactttttcagttttaaataagaaaaacccaactcaaagtagcttaaataaaaggagacattttttgacttacataacctaaaagctctggcctggatctaggtgctcaacagatctcaagagtatctctcttattctctctccctcccttaccctcctcctcttttctctcttctgtatatatgttattttcaaacaggctctcacaagtagtggcaagatatagttcctaatagcttcaggtttgcattctacctactttagcaactatgatgagaagagagctacaatttgagcaaaaatttgtagggtgagttctgatttccctggattgaggcacatgcctattattcctgaaccaaatattctgtccagggaatggaattctctggggcatgtatctaaagctgaagtgtagagcctgccacacagggataataatagttttccaaagaaaaatcaaggaggggaaagaatgttggaaagagaaaaaaatatcagttgtctgcttcacatttgttctcaataattagtttcatagaagtgaaatactgtgtaacaccctaaactttagagattcttcgtagacaggaaaaataagaactcaatgaagttgtgacttcattcaaatcacgtagtttatatacatgctattagtaaaacccaggacagctgagtacaagttttacccttatattcacattgaggtccagatcctggttttgaatgagataattacgtgcagtcggactgttttctgatcctaaaaatagagacaataatatctatcttgtaaagttatggtagtgttaaagatatataaaatgttggcaagtaccttaatatacaataactactgctatatgttgtcattgtaataataatcatatttcttcctttgttgaattgctttcctgtagtaatcttattgtgatcatcctgaaacatagatttccgagcttcaagcaaacactattatgttgaaaaatctacattatttctaagtttagcagtgccagtggaaagtttattgaaatagaaaattacttttttaactgaggagtgtagattgtgaattcgtgattcatcttcttaggagatgatcggaatattgataaatattgatgcatagaatatgaacaaaacattacatatcttgtgctgtgatattaaagtagtattctgttctggtagtagtatggcagtattttaggtctgaaagatgtacataatctgtactttgaagtctgttttttaagagattaatcacaagagatttacataaaacaactaaggttaaaaataaatggtggattagagatacatcaggcaaatttcaatttcaaaagcagatgacagaatctcagtatcagggtagcatttaaagcaaaaagcattaaactggatcaaaaatgtcattttacatcaacacagggtacactccaggtaaagacttaacagttatgaacgaatgtgctaaacatcaaaatgtattaagtaaaagctgaaagaaatgaagaataattggtagaaaagcaatgataggaatccttaatgtacttcaaaaggcacgaagtaagaaggtacagtcatgtaccacataatgatgtttgagtcaacacctgacctggtatacgacaatggtcctataaaattataatggagctaaaaagcttctatcacctagtgatgttgaagccgttgcaatgcaatgtatcactcacatgtttgtggtaatgctggtgtaagcaaacttactgtactgtcagttgtataaaagcatagcacagttatgttcagcacataatactttataatgataaacgaatatgttactagtttacgtgtttacagtactattattttagcatgtgcttctgcttattaaaaaatgttaactataaaataatctttaggcagatcctacaggaggtattccagataaaggcattattgtcataggagatggcagctccatggatgttattgccccttaagaccttccagtgggacaagatgtataggtggaagacagtgatattgatgatcctgaccttgtagaggccaaggctaaagtatgtatttattagtttttaacaagagtttaaaaagtaaaaaaaaaaaataaatttaaaaatagaaaaaatcttaataaggatacaaagaaaaaatgtttttgtgtagctgtgtaatatgtttttgttttaagttaaatgttacaaaagagtcagagttaaatttttttatatttataaagtgaaaaagttataaaatgctaaggttaatttactgaagaaagaaaaaatttttaaacagatttagagtagcatgtttataaaatctacagtagtttacagtaatatcctaggccttcacattaactcaccactcacccactgactcacccagagcagcttccaatcctgtaagctccattcgtggtaagtgccctatacaggtgtacaatttttatatcctttataccatttttactgaaccttttctgtcttttagatacacaaataacattgtgttacagttgcctatgatattgaatacagtaacttactgtacaagtttgtagcataggagctgtatcatatagcctgggtgtgtagtgaactataccatctaggcttgtgtaagtatattttatgacacagtgatgaaatcatccagatacagtttctcttaagcaacacataactgtatatatatatatataggtggctttaataataaaataatgaaatatatttctttttttctgtcattgacaaaacaattaccagtcttactaattagatcaactgcaaaacaaaatctcactcaaaaataaaaatatgtaagtcccattccttgattacaattcattagaactggagatttttaaaaatgtttaaatttatatggaaatataaaatca

SEQ ID NO: 901 - DNA, 4100 bp, Homo sapiens
atcaggttattttttctagcctgtttactaaatttctacatgttataacctaatgaaattttcttacttcctctttatttaaaacaaactataattactgtctttttaaaaatcttccaatgtggcgttcttatttttcttaacatttgaattttcctgggccaaaccatgttactatgatacacattatttaaggctgttatataatacagtaaaattgtagaactttcataccttgaaggatcttagcaattatttaattcaaacccattctaacatagatgataaaacagatttgcagggttgggcacggtggctcatacctatattcccagcactttgggagactcaagcgggaagattgcttgagcccaggagttcaagaccagcttgggcaacatagtgagaggctgtctctacaaaaaaatatttaaaaaatagccgggcatggtgtcacgtgcctgtagttccagctgcttgggaggctgaggtgggaggattgccagagcctgggaggttgaggctgcagtgagccatgatcacaccacagcactctagcctagagcctccctgtgtggcaggctctacacttcagataggcaacagatcgagaccttgtttcacaaaacgaacagatctgcaaagatcaacctgtcctaagtcatataatctctttgtgtaataataaaaaccccatcttctaaccttaaacctggtatttttttctacgaaactatgttctgcagtccaaattatttttctttattattttgaatcctaaagtagaaatagaaacttagaaaaataaaaagcaactcctttatgacatatgaggactttttcagttttaaataagaaaaacccaactcaaagtagcttaaataaaaggagacattttttgacttacataacctaaaagctctggcctggatctaggtgctcaacagatctcaagagtatctctcttattctctctccctcccttaccctcctcctcttttctctcttctgtatatatgttattttcaaacaggctctcacaagtagtggcaagatatagttcctaatagcttcaggtttgcattctacctactttagcaactatgatgagaagagagctacaatttgagcaaaaatttgtagggtgagttctgatttccctggattgaggcacatgcctattattcctgaaccaaatattctgtccagggaatggaattctctggggcatgtatctaaagctgaagtgtagagcctgccacacagggataataatagttttccaaagaaaaatcaaggaggggaaagaatgttggaaagagaaaaaaatatcagttgtctgcttcacatttgttctcaataattagtttcatagaagtgaaatactgtgtaacaccctaaactttagagattcttcgtagacaggaaaaataagaactcaatgaagttgtgacttcattcaaatcacgtagtttatatacatgctattagtaaaacccaggacagctgagtacaagttttacccttatattcacattgaggtccagatcctggttttgaatgagataattacgtgcagtcggactgttttctgatcctaaaaatagagacaataatatctatcttgtaaagttatggtagtgttaaagatatataaaatgttggcaagtaccttaatatacaataactactgctatatgttgtcattgtaataataatcatatttcttcctttgttgaattgctttcctgtagtaatcttattgtgatcatcctgaaacatagatttccgagcttcaagcaaacactattatgttgaaaaatctacattatttctaagtttagcagtgccagtggaaagtttattgaaatagaaaattacttttttaactgaggagtgtagattgtgaattcgtgattcatcttcttaggagatgatcggaatattgataaatattgatgcatagaatatgaacaaaacattacatatcttgtgctgtgatattaaagtagtattctgttctggtagtagtatggcagtattttaggtctgaaagatgtacataatctgtactttgaagtctgttttttaagagattaatcacaagagatttacataaaacaactaaggttaaaaataaatggtggattagagatacatcaggcaaatttcaatttcaaaagcagatgacagaatctcagtatcagggtagcatttaaagcaaaaagcattaaactggatcaaaaatgtcattttacatcaacacagggtacactccaggtaaagacttaacagttatgaacgaatgtgctaaacatcaaaatgtattaagtaaaagctgaaagaaatgaagaataattggtagaaaagcaatgataggaatccttaatgtacttcaaaaggcacgaagtaagaaggtacagtcatgtaccacataatgatgtttgagtcaacacctgacctggtatacgacaatggtcctataaaattataatggagctaaaaagcttctatcacctagtgatgttgaagccgttgcaatgcaatgtatcactcacatgtttgtggtaatgctggtgtaagcaaacttactgtactgtcagttgtataaaagcatagcacagttatgttcagcacataatactttataatgataaacgaatatgttactagtttacgtgtttacagtactattattttagcatgtgcttctgcttattaaaaaatgttaactataaaataatctttaggcagatcctacaggaggtattccagataaaggcattattgtcataggagatggcagctccatggatgttattgccccttaagaccttccagtgggacaagatgtataggtggaagacagtgatattgatgatcctgaccttgtagaggccaaggctaaagtatgtatttattagtttttaacaagagtttaaaaagtaaaaaaaaaaaataaatttaaaaatagaaaaaatcttaataaggatacaaagaaaaaatgtttttgtgtagctgtgtaatatgtttttgttttaagttaaatgttacaaaagagtcagagttaaatttttttatatttataaagtgaaaaagttataaaatgctaaggttaatttactgaagaaagaaaaaatttttaaacagatttagagtagcatgtttataaaatctacagtagtttacagtaatatcctaggccttcacattaactcaccactcacccactgactcacccagagcagcttccaatcctgtaagctccattcgtggtaagtgccctatacaggtgtacaatttttatatcctttataccatttttactgaaccttttctgtcttttagatacacaaataacattgtgttacagttgcctatgatattgaatacagtaacttactgtacaagtttgtagcataggagctgtatcatatagcctgggtgtgtagtgaactataccatctaggcttgtgtaagtatattttatgacacagtgatgaaatcatccagatacagtttctcttaagcaacacataactgtatatatatatatataggtggctttaataataaaataatgaaatatatttctttttttctgtcattgacaaaacaattaccagtcttactaattagatcaactgcaaaacaaaatctcactcaaaaataaaaatatgtaagtcccattccttgattacaattcattagaactggagatttttaaaaatgtttaaatttatatggaaatataaaatcatgttttaaataatttttgattcaatgaggaaatgtaaatttagaactaaagattaataactagagatttataaaggcaaaaatgttaatgaattaggaaacagtaaaccatttgaactaatctaaatactgattgcatgaaaatgccaataaaatcaatacatatttttaaaagccagtcaaggataaaagaaaagagggaaactaaaagtgagacattaagtatgagaaaggagataaaactaaagtgtggaggtgatgttaaaaattatattcaggtctgtgctaatcattttggaaatttcagtgagaagtgggcaattttcagtgaatatatcatt

SEQ ID NO: 902 - DNA, 4054 bp, Homo sapiens
tgaattttcctgggccaaaccatgttactatgatacacattatttaaggctgttatataatacagtaaaattgtagaactttcataccttgaaggatcttagcaattatttaattcaaacccattctaacatagatgataaaacagatttgcagggttgggcacggtggctcatacctatattcccagcactttgggagactcaagcgggaagattgcttgagcccaggagttcaagaccagcttgggcaacatagtgagaggctgtctctacaaaaaaatatttaaaaaatagccgggcatggtgtcacgtgcctgtagttccagctgcttgggaggctgaggtgggaggattgccagagcctgggaggttgaggctgcagtgagccatgatcacaccacagcactctagcctagagcctccctgtgtggcaggctctacacttcagataggcaacagatcgagaccttgtttcacaaaacgaacagatctgcaaagatcaacctgtcctaagtcatataatctctttgtgtaataataaaaaccccatcttctaaccttaaacctggtatttttttctacgaaactatgttctgcagtccaaattatttttctttattattttgaatcctaaagtagaaatagaaacttagaaaaataaaaagcaactcctttatgacatatgaggactttttcagttttaaataagaaaaacccaactcaaagtagcttaaataaaaggagacattttttgacttacataacctaaaagctctggcctggatctaggtgctcaacagatctcaagagtatctctcttattctctctccctcccttaccctcctcctcttttctctcttctgtatatatgttattttcaaacaggctctcacaagtagtggcaagatatagttcctaatagcttcaggtttgcattctacctactttagcaactatgatgagaagagagctacaatttgagcaaaaatttgtagggtgagttctgatttccctggattgaggcacatgcctattattcctgaaccaaatattctgtccagggaatggaattctctggggcatgtatctaaagctgaagtgtagagcctgccacacagggataataatagttttccaaagaaaaatcaaggaggggaaagaatgttggaaagagaaaaaaatatcagttgtctgcttcacatttgttctcaataattagtttcatagaagtgaaatactgtgtaacaccctaaactttagagattcttcgtagacaggaaaaataagaactcaatgaagttgtgacttcattcaaatcacgtagtttatatacatgctattagtaaaacccaggacagctgagtacaagttttacccttatattcacattgaggtccagatcctggttttgaatgagataattacgtgcagtcggactgttttctgatcctaaaaatagagacaataatatctatcttgtaaagttatggtagtgttaaagatatataaaatgttggcaagtaccttaatatacaataactactgctatatgttgtcattgtaataataatcatatttcttcctttgttgaattgctttcctgtagtaatcttattgtgatcatcctgaaacatagatttccgagcttcaagcaaacactattatgttgaaaaatctacattatttctaagtttagcagtgccagtggaaagtttattgaaatagaaaattacttttttaactgaggagtgtagattgtgaattcgtgattcatcttcttaggagatgatcggaatattgataaatattgatgcatagaatatgaacaaaacattacatatcttgtgctgtgatattaaagtagtattctgttctggtagtagtatggcagtattttaggtctgaaagatgtacataatctgtactttgaagtctgttttttaagagattaatcacaagagatttacataaaacaactaaggttaaaaataaatggtggattagagatacatcaggcaaatttcaatttcaaaagcagatgacagaatctcagtatcagggtagcatttaaagcaaaaagcattaaactggatcaaaaatgtcattttacatcaacacagggtacactccaggtaaagacttaacagttatgaacgaatgtgctaaacatcaaaatgtattaagtaaaagctgaaagaaatgaagaataattggtagaaaagcaatgataggaatccttaatgtacttcaaaaggcacgaagtaagaaggtacagtcatgtaccacataatgatgtttgagtcaacacctgacctggtatacgacaatggtcctataaaattataatggagctaaaaagcttctatcacctagtgatgttgaagccgttgcaatgcaatgtatcactcacatgtttgtggtaatgctggtgtaagcaaacttactgtactgtcagttgtataaaagcatagcacagttatgttcagcacataatactttataatgataaacgaatatgttactagtttacgtgtttacagtactattattttagcatgtgcttctgcttattaaaaaatgttaactataaaataatctttaggcagatcctacaggaggtattccagataaaggcattattgtcataggagatggcagctccatggatgttattgccccttaagaccttccagtgggacaagatgtataggtggaagacagtgatattgatgatcctgaccttgtagaggccaaggctaaagtatgtatttattagtttttaacaagagtttaaaaagtaaaaaaaaaaaataaatttaaaaatagaaaaaatcttaataaggatacaaagaaaaaatgtttttgtgtagctgtgtaatatgtttttgttttaagttaaatgttacaaaagagtcagagttaaatttttttatatttataaagtgaaaaagttataaaatgctaaggttaatttactgaagaaagaaaaaatttttaaacagatttagagtagcatgtttataaaatctacagtagtttacagtaatatcctaggccttcacattaactcaccactcacccactgactcacccagagcagcttccaatcctgtaagctccattcgtggtaagtgccctatacaggtgtacaatttttatatcctttataccatttttactgaaccttttctgtcttttagatacacaaataacattgtgttacagttgcctatgatattgaatacagtaacttactgtacaagtttgtagcataggagctgtatcatatagcctgggtgtgtagtgaactataccatctaggcttgtgtaagtatattttatgacacagtgatgaaatcatccagatacagtttctcttaagcaacacataactgtatatatatatatataggtggctttaataataaaataatgaaatatatttctttttttctgtcattgacaaaacaattaccagtcttactaattagatcaactgcaaaacaaaatctcactcaaaaataaaaatatgtaagtcccattccttgattacaattcattagaactggagatttttaaaaatgtttaaatttatatggaaatataaaatcatgttttaaataatttttgattcaatgaggaaatgtaaatttagaactaaagattaataactagagatttataaaggcaaaaatgttaatgaattaggaaacagtaaaccatttgaactaatctaaatactgattgcatgaaaatgccaataaaatcaatacatatttttaaaagccagtcaaggataaaagaaaagagggaaactaaaagtgagacattaagtatgagaaaggagataaaactaaagtgtggaggtgatgttaaaaattatattcaggtctgtgctaatcattttggaaatttcagtgagaagtgggcaattttcagtgaatatatcattgtaaatgctttgaggagagacaaaatctgaatagaccctgcaataatgaaaatgtctaggagccctcaagaaatacctggtttaaattgcatttcaggtgg

SEQ ID NO: 903 - DNA, 4047 bp, Homo sapiens
cagggttgggcacggtggctcatacctatattcccagcactttgggagactcaagcgggaagattgcttgagcccaggagttcaagaccagcttgggcaacatagtgagaggctgtctctacaaaaaaatatttaaaaaatagccgggcatggtgtcacgtgcctgtagttccagctgcttgggaggctgaggtgggaggattgccagagcctgggaggttgaggctgcagtgagccatgatcacaccacagcactctagcctagagcctccctgtgtggcaggctctacacttcagataggcaacagatcgagaccttgtttcacaaaacgaacagatctgcaaagatcaacctgtcctaagtcatataatctctttgtgtaataataaaaaccccatcttctaaccttaaacctggtatttttttctacgaaactatgttctgcagtccaaattatttttctttattattttgaatcctaaagtagaaatagaaacttagaaaaataaaaagcaactcctttatgacatatgaggactttttcagttttaaataagaaaaacccaactcaaagtagcttaaataaaaggagacattttttgacttacataacctaaaagctctggcctggatctaggtgctcaacagatctcaagagtatctctcttattctctctccctcccttaccctcctcctcttttctctcttctgtatatatgttattttcaaacaggctctcacaagtagtggcaagatatagttcctaatagcttcaggtttgcattctacctactttagcaactatgatgagaagagagctacaatttgagcaaaaatttgtagggtgagttctgatttccctggattgaggcacatgcctattattcctgaaccaaatattctgtccagggaatggaattctctggggcatgtatctaaagctgaagtgtagagcctgccacacagggataataatagttttccaaagaaaaatcaaggaggggaaagaatgttggaaagagaaaaaaatatcagttgtctgcttcacatttgttctcaataattagtttcatagaagtgaaatactgtgtaacaccctaaactttagagattcttcgtagacaggaaaaataagaactcaatgaagttgtgacttcattcaaatcacgtagtttatatacatgctattagtaaaacccaggacagctgagtacaagttttacccttatattcacattgaggtccagatcctggttttgaatgagataattacgtgcagtcggactgttttctgatcctaaaaatagagacaataatatctatcttgtaaagttatggtagtgttaaagatatataaaatgttggcaagtaccttaatatacaataactactgctatatgttgtcattgtaataataatcatatttcttcctttgttgaattgctttcctgtagtaatcttattgtgatcatcctgaaacatagatttccgagcttcaagcaaacactattatgttgaaaaatctacattatttctaagtttagcagtgccagtggaaagtttattgaaatagaaaattacttttttaactgaggagtgtagattgtgaattcgtgattcatcttcttaggagatgatcggaatattgataaatattgatgcatagaatatgaacaaaacattacatatcttgtgctgtgatattaaagtagtattctgttctggtagtagtatggcagtattttaggtctgaaagatgtacataatctgtactttgaagtctgttttttaagagattaatcacaagagatttacataaaacaactaaggttaaaaataaatggtggattagagatacatcaggcaaatttcaatttcaaaagcagatgacagaatctcagtatcagggtagcatttaaagcaaaaagcattaaactggatcaaaaatgtcattttacatcaacacagggtacactccaggtaaagacttaacagttatgaacgaatgtgctaaacatcaaaatgtattaagtaaaagctgaaagaaatgaagaataattggtagaaaagcaatgataggaatccttaatgtacttcaaaaggcacgaagtaagaaggtacagtcatgtaccacataatgatgtttgagtcaacacctgacctggtatacgacaatggtcctataaaattataatggagctaaaaagcttctatcacctagtgatgttgaagccgttgcaatgcaatgtatcactcacatgtttgtggtaatgctggtgtaagcaaacttactgtactgtcagttgtataaaagcatagcacagttatgttcagcacataatactttataatgataaacgaatatgttactagtttacgtgtttacagtactattattttagcatgtgcttctgcttattaaaaaatgttaactataaaataatctttaggcagatcctacaggaggtattccagataaaggcattattgtcataggagatggcagctccatggatgttattgccccttaagaccttccagtgggacaagatgtataggtggaagacagtgatattgatgatcctgaccttgtagaggccaaggctaaagtatgtatttattagtttttaacaagagtttaaaaagtaaaaaaaaaaaataaatttaaaaatagaaaaaatcttaataaggatacaaagaaaaaatgtttttgtgtagctgtgtaatatgtttttgttttaagttaaatgttacaaaagagtcagagttaaatttttttatatttataaagtgaaaaagttataaaatgctaaggttaatttactgaagaaagaaaaaatttttaaacagatttagagtagcatgtttataaaatctacagtagtttacagtaatatcctaggccttcacattaactcaccactcacccactgactcacccagagcagcttccaatcctgtaagctccattcgtggtaagtgccctatacaggtgtacaatttttatatcctttataccatttttactgaaccttttctgtcttttagatacacaaataacattgtgttacagttgcctatgatattgaatacagtaacttactgtacaagtttgtagcataggagctgtatcatatagcctgggtgtgtagtgaactataccatctaggcttgtgtaagtatattttatgacacagtgatgaaatcatccagatacagtttctcttaagcaacacataactgtatatatatatatataggtggctttaataataaaataatgaaatatatttctttttttctgtcattgacaaaacaattaccagtcttactaattagatcaactgcaaaacaaaatctcactcaaaaataaaaatatgtaagtcccattccttgattacaattcattagaactggagatttttaaaaatgtttaaatttatatggaaatataaaatcatgttttaaataatttttgattcaatgaggaaatgtaaatttagaactaaagattaataactagagatttataaaggcaaaaatgttaatgaattaggaaacagtaaaccatttgaactaatctaaatactgattgcatgaaaatgccaataaaatcaatacatatttttaaaagccagtcaaggataaaagaaaagagggaaactaaaagtgagacattaagtatgagaaaggagataaaactaaagtgtggaggtgatgttaaaaattatattcaggtctgtgctaatcattttggaaatttcagtgagaagtgggcaattttcagtgaatatatcattgtaaatgctttgaggagagacaaaatctgaatagaccctgcaataatgaaaatgtctaggagccctcaagaaatacctggtttaaattgcatttcaggtggctggttatcacaccttgaagtatcaagtaattatgttatctaaattggaccaggtgttagaaaaatatgtgagacttcacaggtggctgcttatgtagcccttataccttaatctgataaaggtagcatatatttaaaaagaga

SEQ ID NO: 904 - DNA, 4046 bp, Homo sapiens
tccagctattccaaaactgcaccttgaatacaggtacagaattgctaaaaccgtgtaccattttgtagttttagcatgcttttgtgtaactgcatctggtgtttgatcctcatgagagccctgttaaggaagggtacatattattgtcctcattttccttcgaaaacacatcagagtttgtattttgactgtcagcattcaaatacaagtcttttatttataaaattttggtctttatactgtggctaaaaatcttaaatcacttgtcatgatttgaaatggtttataccgattttttttgacatttatacacacatacacatatttttaaattgtctataataaaatcatgctcatctttgaaaaaatattaggagtactacagtggatacctacatacttgctattcagcatacctggttttttgtttgttttttgagacagtcttctctgtggtccaggttggagtgcagtggcacgatctcagctcattgcaacctccgtctcccaggctcaagtgattgtcctgcctcagcctcccaagtagctgggactgcaggtacacatcaccacgcccagctaattttttgtatttttggtagagacggggtttcaccatgttggccaggctggtctccaactcctgacctcaagtgatcagcccacctcggcctcccagagtgctgggattacaggttgtgagccactgcacctggcctgtttttaaattcacataaatatgttttatatttttcattagggagaagaaggttgtgtctacaatttttaagacattggggagatttagatgccagtagtaacttaaaagagaaataattgcaaattctttttcctcttgagtatactttcatttaaggtacagtgttctgtaagttacttttaccgttaaacttcttaatgttgcttattgtttgtcttacatttttaggttggatttttcttaagtcacatgtctaataaaaaaaacccttaaatacctcatttattcgtcttcgttagtgaatgcattgttgtacatattagatttttctctttagataactcagcttcccctattaagtgccacatgtattacaaaattttatttatgttttattgtttaataaactcttgagaactagatacattttaatcatttgtaatacttacattttctaaaacacttcatttttccctggtttcttcaacaaagagatgcatgtagtacaaggatagctttacctgtgttagaagattgtttcacacatttacatcaactgcatagtcctgtttttgttgggccctaatgccagcatcactttttgctactgctgtttctgccttaaaggcaatatgcctctgtctagtttgctgattctgatactctttcccctggaaagtaggtaatcaagtttgtgaggagctgtgtgtttaaggagtccataaatccttgtggggagccctaggtgtatagagcatagctgtagggcagaggcctttgacacttattctggatatgcagtggcctttgcctatggggttcatgggtcagagcgctgttgtgacctttgaataaatgggttgttatgataattgttttaagggaggagagttattctgatatcctttgtattgatattgctcttatttattattgagctggatttaagtattaatcatttaaggtcaaatttctaatgtatatatgttcttaaatggctacgacccagttaccatagcaatttagtgaaataactataatggaacattttttttcaatttggcttctcttttttttctgtccaccagggagtaactattcccagtcagaggcgctatgtgtattattatagctacctgttaaagaatcatctggattatagaccagtggcactgttgtttcacaagatgatgtttgaaactattccaatgttcagtggcggaacttgcagtaagtgcttgaaattctcatccttccatgtattggaacagttttcttaaccatatctagaagtttacataaaaatttagaaagaaatttaccacatttgaaatttatgcaggagactatatttctgaagcatttgaacaaattaattagctttgttgttcaactcattgggctaaagaagccaaaagcaatgggttttaatgtagtcgaagccaaattatatttatgaaagaaatattctgtgttataaccaccaaatacagcccaattctgactagatgatggaagaacctgtcccatcagaggtccagcatgaggtccagcagaggtccaccagaggagttcagcaatttgctgctcttagggcagggatcaattccttaatatcttaggaagactaggtattgacagtaatggtgacaaagcaatgaaaaggaaaggaagaagtgataagacgtggcagcaagctgaagtatgatgagtaaagaataggaatcaaagtatgtggagtgttagagaaaacctggatttagatccagattctagtcctatctctgtcattaatctattgcgtaaccctgagcatatcatctacctctctttgagtttgcttgtcaataaaatgaagagactttgaaatctgagacttcctggataagtactaaatacagattatgtcactgatgtctgcctctatttatttctcccttttaccctaatctctataagtctacctcagtcatcctgatcctattctacttctctgatgttgttgtcagataggtgtgatcatcctcatcagatcttttctgtattcttagagacagataactttatcaaagaccacagatttattagtatagcatgttaaagtcttctaaagagtctcattgatgctcttttcatctcagtacaatttttaaaactgctgaatgcaaggtactgagctgttggaagtgactgacagatgaatgtaacagattcatagagaaggaaaaaggaagaaaaactcatgctcttcctatagtattgatatcagtgtaagagccaagagaaaggtataaagtatcatgcagatattaagggaaagaaaacattcactttagtaatctttcctcattttctagtttcctcttatgtactatgatttaatactgtagtaaagttttaataaaatatgagctatatgtaattaagtgggaggttgtggggctaggcacgaggctcacacgtgtaaccccagcactttgggaggctgaggcaggcggatcgcttgatctcaggagttcgagaccagcctggacaacaaggtgaaaccccatctctactaaaaacacaaaaattagctgggcatagtggcacacacctgtagtcccagcttcttgggaggctgaggcaggagaatcgcttgaatccaggaggcagaggttgcagttagccgagatcatgccactgcactgcagcctggacatcggagcaagactttgtcttagaaataaataaataaatataaaataaaataaatgggaagttgtgtatataaattataaatgctacattcagaaaagcttttgaaggttgtcagacagtttcttaaaggaagttcaccagttctttattgaacattgaagaaaacatacagtttagactggcattaaaactgaaagaagtggccagacgcagtggtagacgcagtggttcacgcctgtaatcccagcactttgggaggtcaaggtggatggatcacctgaggtcaggagtttgagatcaggctggccgacatggtgaaaccctgtctctactaaaaatacaaaaattagccaggcatggtgatgcgtgcctgtagtcccagctacttgggaggctgaggcaggagaattgcttgaagccgaaggtggaggttgcagtgagccgagattgcgtcattgcactccagccagggcggtaagagtgaggctccgtcttaaaaaaaaaataagtaaataaattaaaaactactgaaagaagtattacaggcaatgggaaatagcttgagtggaagtgcagcagaaggaaaaagctggacaagaatgtagtgtcagagaataggtatgga

SEQ ID NO: 905 - DNA, 4051 bp, Homo sapiens
taccgattttttttgacatttatacacacatacacatatttttaaattgtctataataaaatcatgctcatctttgaaaaaatattaggagtactacagtggatacctacatacttgctattcagcatacctggttttttgtttgttttttgagacagtcttctctgtggtccaggttggagtgcagtggcacgatctcagctcattgcaacctccgtctcccaggctcaagtgattgtcctgcctcagcctcccaagtagctgggactgcaggtacacatcaccacgcccagctaattttttgtatttttggtagagacggggtttcaccatgttggccaggctggtctccaactcctgacctcaagtgatcagcccacctcggcctcccagagtgctgggattacaggttgtgagccactgcacctggcctgtttttaaattcacataaatatgttttatatttttcattagggagaagaaggttgtgtctacaatttttaagacattggggagatttagatgccagtagtaacttaaaagagaaataattgcaaattctttttcctcttgagtatactttcatttaaggtacagtgttctgtaagttacttttaccgttaaacttcttaatgttgcttattgtttgtcttacatttttaggttggatttttcttaagtcacatgtctaataaaaaaaacccttaaatacctcatttattcgtcttcgttagtgaatgcattgttgtacatattagatttttctctttagataactcagcttcccctattaagtgccacatgtattacaaaattttatttatgttttattgtttaataaactcttgagaactagatacattttaatcatttgtaatacttacattttctaaaacacttcatttttccctggtttcttcaacaaagagatgcatgtagtacaaggatagctttacctgtgttagaagattgtttcacacatttacatcaactgcatagtcctgtttttgttgggccctaatgccagcatcactttttgctactgctgtttctgccttaaaggcaatatgcctctgtctagtttgctgattctgatactctttcccctggaaagtaggtaatcaagtttgtgaggagctgtgtgtttaaggagtccataaatccttgtggggagccctaggtgtatagagcatagctgtagggcagaggcctttgacacttattctggatatgcagtggcctttgcctatggggttcatgggtcagagcgctgttgtgacctttgaataaatgggttgttatgataattgttttaagggaggagagttattctgatatcctttgtattgatattgctcttatttattattgagctggatttaagtattaatcatttaaggtcaaatttctaatgtatatatgttcttaaatggctacgacccagttaccatagcaatttagtgaaataactataatggaacattttttttcaatttggcttctcttttttttctgtccaccagggagtaactattcccagtcagaggcgctatgtgtattattatagctacctgttaaagaatcatctggattatagaccagtggcactgttgtttcacaagatgatgtttgaaactattccaatgttcagtggcggaacttgcagtaagtgcttgaaattctcatccttccatgtattggaacagttttcttaaccatatctagaagtttacataaaaatttagaaagaaatttaccacatttgaaatttatgcaggagactatatttctgaagcatttgaacaaattaattagctttgttgttcaactcattgggctaaagaagccaaaagcaatgggttttaatgtagtcgaagccaaattatatttatgaaagaaatattctgtgttataaccaccaaatacagcccaattctgactagatgatggaagaacctgtcccatcagaggtccagcatgaggtccagcagaggtccaccagaggagttcagcaatttgctgctcttagggcagggatcaattccttaatatcttaggaagactaggtattgacagtaatggtgacaaagcaatgaaaaggaaaggaagaagtgataagacgtggcagcaagctgaagtatgatgagtaaagaataggaatcaaagtatgtggagtgttagagaaaacctggatttagatccagattctagtcctatctctgtcattaatctattgcgtaaccctgagcatatcatctacctctctttgagtttgcttgtcaataaaatgaagagactttgaaatctgagacttcctggataagtactaaatacagattatgtcactgatgtctgcctctatttatttctcccttttaccctaatctctataagtctacctcagtcatcctgatcctattctacttctctgatgttgttgtcagataggtgtgatcatcctcatcagatcttttctgtattcttagagacagataactttatcaaagaccacagatttattagtatagcatgttaaagtcttctaaagagtctcattgatgctcttttcatctcagtacaatttttaaaactgctgaatgcaaggtactgagctgttggaagtgactgacagatgaatgtaacagattcatagagaaggaaaaaggaagaaaaactcatgctcttcctatagtattgatatcagtgtaagagccaagagaaaggtataaagtatcatgcagatattaagggaaagaaaacattcactttagtaatctttcctcattttctagtttcctcttatgtactatgatttaatactgtagtaaagttttaataaaatatgagctatatgtaattaagtgggaggttgtggggctaggcacgaggctcacacgtgtaaccccagcactttgggaggctgaggcaggcggatcgcttgatctcaggagttcgagaccagcctggacaacaaggtgaaaccccatctctactaaaaacacaaaaattagctgggcatagtggcacacacctgtagtcccagcttcttgggaggctgaggcaggagaatcgcttgaatccaggaggcagaggttgcagttagccgagatcatgccactgcactgcagcctggacatcggagcaagactttgtcttagaaataaataaataaatataaaataaaataaatgggaagttgtgtatataaattataaatgctacattcagaaaagcttttgaaggttgtcagacagtttcttaaaggaagttcaccagttctttattgaacattgaagaaaacatacagtttagactggcattaaaactgaaagaagtggccagacgcagtggtagacgcagtggttcacgcctgtaatcccagcactttgggaggtcaaggtggatggatcacctgaggtcaggagtttgagatcaggctggccgacatggtgaaaccctgtctctactaaaaatacaaaaattagccaggcatggtgatgcgtgcctgtagtcccagctacttgggaggctgaggcaggagaattgcttgaagccgaaggtggaggttgcagtgagccgagattgcgtcattgcactccagccagggcggtaagagtgaggctccgtcttaaaaaaaaaataagtaaataaattaaaaactactgaaagaagtattacaggcaatgggaaatagcttgagtggaagtgcagcagaaggaaaaagctggacaagaatgtagtgtcagagaataggtatggaacgtgtgagtgactgttagaggatcttgaatggggataacagacttgatttcataaatactgagatgtcatgataatacttgaggactaaaccatgttttaaggacagttgtatgcaaagttgtaatcgcaagaggaaaaaatagtggaaaagaaaccagtaataaaacttgccttaatgcaggtatgctaagacaatcaaatgggatttcattaattttttatttgccatttatagccaaagattttgtaaaagttttgagcccagtcaggtgaaatagtctcagaaaga

SEQ ID NO: 906 - DNA, 4099 bp, Homo sapiens
atcatgctcatctttgaaaaaatattaggagtactacagtggatacctacatacttgctattcagcatacctggttttttgtttgttttttgagacagtcttctctgtggtccaggttggagtgcagtggcacgatctcagctcattgcaacctccgtctcccaggctcaagtgattgtcctgcctcagcctcccaagtagctgggactgcaggtacacatcaccacgcccagctaattttttgtatttttggtagagacggggtttcaccatgttggccaggctggtctccaactcctgacctcaagtgatcagcccacctcggcctcccagagtgctgggattacaggttgtgagccactgcacctggcctgtttttaaattcacataaatatgttttatatttttcattagggagaagaaggttgtgtctacaatttttaagacattggggagatttagatgccagtagtaacttaaaagagaaataattgcaaattctttttcctcttgagtatactttcatttaaggtacagtgttctgtaagttacttttaccgttaaacttcttaatgttgcttattgtttgtcttacatttttaggttggatttttcttaagtcacatgtctaataaaaaaaacccttaaatacctcatttattcgtcttcgttagtgaatgcattgttgtacatattagatttttctctttagataactcagcttcccctattaagtgccacatgtattacaaaattttatttatgttttattgtttaataaactcttgagaactagatacattttaatcatttgtaatacttacattttctaaaacacttcatttttccctggtttcttcaacaaagagatgcatgtagtacaaggatagctttacctgtgttagaagattgtttcacacatttacatcaactgcatagtcctgtttttgttgggccctaatgccagcatcactttttgctactgctgtttctgccttaaaggcaatatgcctctgtctagtttgctgattctgatactctttcccctggaaagtaggtaatcaagtttgtgaggagctgtgtgtttaaggagtccataaatccttgtggggagccctaggtgtatagagcatagctgtagggcagaggcctttgacacttattctggatatgcagtggcctttgcctatggggttcatgggtcagagcgctgttgtgacctttgaataaatgggttgttatgataattgttttaagggaggagagttattctgatatcctttgtattgatattgctcttatttattattgagctggatttaagtattaatcatttaaggtcaaatttctaatgtatatatgttcttaaatggctacgacccagttaccatagcaatttagtgaaataactataatggaacattttttttcaatttggcttctcttttttttctgtccaccagggagtaactattcccagtcagaggcgctatgtgtattattatagctacctgttaaagaatcatctggattatagaccagtggcactgttgtttcacaagatgatgtttgaaactattccaatgttcagtggcggaacttgcagtaagtgcttgaaattctcatccttccatgtattggaacagttttcttaaccatatctagaagtttacataaaaatttagaaagaaatttaccacatttgaaatttatgcaggagactatatttctgaagcatttgaacaaattaattagctttgttgttcaactcattgggctaaagaagccaaaagcaatgggttttaatgtagtcgaagccaaattatatttatgaaagaaatattctgtgttataaccaccaaatacagcccaattctgactagatgatggaagaacctgtcccatcagaggtccagcatgaggtccagcagaggtccaccagaggagttcagcaatttgctgctcttagggcagggatcaattccttaatatcttaggaagactaggtattgacagtaatggtgacaaagcaatgaaaaggaaaggaagaagtgataagacgtggcagcaagctgaagtatgatgagtaaagaataggaatcaaagtatgtggagtgttagagaaaacctggatttagatccagattctagtcctatctctgtcattaatctattgcgtaaccctgagcatatcatctacctctctttgagtttgcttgtcaataaaatgaagagactttgaaatctgagacttcctggataagtactaaatacagattatgtcactgatgtctgcctctatttatttctcccttttaccctaatctctataagtctacctcagtcatcctgatcctattctacttctctgatgttgttgtcagataggtgtgatcatcctcatcagatcttttctgtattcttagagacagataactttatcaaagaccacagatttattagtatagcatgttaaagtcttctaaagagtctcattgatgctcttttcatctcagtacaatttttaaaactgctgaatgcaaggtactgagctgttggaagtgactgacagatgaatgtaacagattcatagagaaggaaaaaggaagaaaaactcatgctcttcctatagtattgatatcagtgtaagagccaagagaaaggtataaagtatcatgcagatattaagggaaagaaaacattcactttagtaatctttcctcattttctagtttcctcttatgtactatgatttaatactgtagtaaagttttaataaaatatgagctatatgtaattaagtgggaggttgtggggctaggcacgaggctcacacgtgtaaccccagcactttgggaggctgaggcaggcggatcgcttgatctcaggagttcgagaccagcctggacaacaaggtgaaaccccatctctactaaaaacacaaaaattagctgggcatagtggcacacacctgtagtcccagcttcttgggaggctgaggcaggagaatcgcttgaatccaggaggcagaggttgcagttagccgagatcatgccactgcactgcagcctggacatcggagcaagactttgtcttagaaataaataaataaatataaaataaaataaatgggaagttgtgtatataaattataaatgctacattcagaaaagcttttgaaggttgtcagacagtttcttaaaggaagttcaccagttctttattgaacattgaagaaaacatacagtttagactggcattaaaactgaaagaagtggccagacgcagtggtagacgcagtggttcacgcctgtaatcccagcactttgggaggtcaaggtggatggatcacctgaggtcaggagtttgagatcaggctggccgacatggtgaaaccctgtctctactaaaaatacaaaaattagccaggcatggtgatgcgtgcctgtagtcccagctacttgggaggctgaggcaggagaattgcttgaagccgaaggtggaggttgcagtgagccgagattgcgtcattgcactccagccagggcggtaagagtgaggctccgtcttaaaaaaaaaataagtaaataaattaaaaactactgaaagaagtattacaggcaatgggaaatagcttgagtggaagtgcagcagaaggaaaaagctggacaagaatgtagtgtcagagaataggtatggaacgtgtgagtgactgttagaggatcttgaatggggataacagacttgatttcataaatactgagatgtcatgataatacttgaggactaaaccatgttttaaggacagttgtatgcaaagttgtaatcgcaagaggaaaaaatagtggaaaagaaaccagtaataaaacttgccttaatgcaggtatgctaagacaatcaaatgggatttcattaattttttatttgccatttatagccaaagattttgtaaaagttttgagcccagtcaggtgaaatagtctcagaaagaaagaaaagtgaatctgagacttggagacattaatgttgatattttggttttaaacgtgttttaaatccggtaaaagtgagcttctcacatgacaatattcagtgggta

SEQ ID NO: 907 - DNA, 4027 bp, Homo sapiens
aagcaatgggttttaatgtagtcgaagccaaattatatttatgaaagaaatattctgtgttataaccaccaaatacagcccaattctgactagatgatggaagaacctgtcccatcagaggtccagcatgaggtccagcagaggtccaccagaggagttcagcaatttgctgctcttagggcagggatcaattccttaatatcttaggaagactaggtattgacagtaatggtgacaaagcaatgaaaaggaaaggaagaagtgataagacgtggcagcaagctgaagtatgatgagtaaagaataggaatcaaagtatgtggagtgttagagaaaacctggatttagatccagattctagtcctatctctgtcattaatctattgcgtaaccctgagcatatcatctacctctctttgagtttgcttgtcaataaaatgaagagactttgaaatctgagacttcctggataagtactaaatacagattatgtcactgatgtctgcctctatttatttctcccttttaccctaatctctataagtctacctcagtcatcctgatcctattctacttctctgatgttgttgtcagataggtgtgatcatcctcatcagatcttttctgtattcttagagacagataactttatcaaagaccacagatttattagtatagcatgttaaagtcttctaaagagtctcattgatgctcttttcatctcagtacaatttttaaaactgctgaatgcaaggtactgagctgttggaagtgactgacagatgaatgtaacagattcatagagaaggaaaaaggaagaaaaactcatgctcttcctatagtattgatatcagtgtaagagccaagagaaaggtataaagtatcatgcagatattaagggaaagaaaacattcactttagtaatctttcctcattttctagtttcctcttatgtactatgatttaatactgtagtaaagttttaataaaatatgagctatatgtaattaagtgggaggttgtggggctaggcacgaggctcacacgtgtaaccccagcactttgggaggctgaggcaggcggatcgcttgatctcaggagttcgagaccagcctggacaacaaggtgaaaccccatctctactaaaaacacaaaaattagctgggcatagtggcacacacctgtagtcccagcttcttgggaggctgaggcaggagaatcgcttgaatccaggaggcagaggttgcagttagccgagatcatgccactgcactgcagcctggacatcggagcaagactttgtcttagaaataaataaataaatataaaataaaataaatgggaagttgtgtatataaattataaatgctacattcagaaaagcttttgaaggttgtcagacagtttcttaaaggaagttcaccagttctttattgaacattgaagaaaacatacagtttagactggcattaaaactgaaagaagtggccagacgcagtggtagacgcagtggttcacgcctgtaatcccagcactttgggaggtcaaggtggatggatcacctgaggtcaggagtttgagatcaggctggccgacatggtgaaaccctgtctctactaaaaatacaaaaattagccaggcatggtgatgcgtgcctgtagtcccagctacttgggaggctgaggcaggagaattgcttgaagccgaaggtggaggttgcagtgagccgagattgcgtcattgcactccagccagggcggtaagagtgaggctccgtcttaaaaaaaaaataagtaaataaattaaaaactactgaaagaagtattacaggcaatgggaaatagcttgagtggaagtgcagcagaaggaaaaagctggacaagaatgtagtgtcagagaataggtatggaacgtgtgagtgactgttagaggatcttgaatggggataacagacttgatttcataaatactgagatgtcatgataatacttgaggactaaaccatgttttaaggacagttgtatgcaaagttgtaatcgcaagaggaaaaaatagtggaaaagaaaccagtaataaaacttgccttaatgcaggtatgctaagacaatcaaatgggatttcattaattttttatttgccatttatagccaaagattttgtaaaagttttgagcccagtcaggtgaaatagtctcagaaagaaagaaaagtgaatctgagacttggagacattaatgttgatattttggttttaaacgtgttttaaatccggtaaaagtgagcttctcacatgacaatattcagtgggtacttgggagtatgggttcgaatctaggtaggagatatatcgatattttgggcatcatcaggaaagggagagtagttaagcctttcatataaataatggtgtggcgtttgggcatgggaagtcttggaggaaaggaagaaaaggagagggtgaggactgagataagaatggcaacttgggtttaggaagaagaagaggaatcaatgtagagaacagatagtgctgaaaaatacagcatcttctgtagggattggcagctttttcttgatttttgtcttaatatttctaagagatggaaaaagctactatattctagacatttaacagggttaaaaatgttactaaaagatgatcaatgtggttttcattcaagactataacaatatgtatatatccaaggaaatttaattctgacttaaaaaaattgttttgcttgtatagatttagggacacaagtgtaattttgttacatgcatagagtgtatagtttcaagtcagggcttttaggttgtccatcatctgaataatatacattgtacccattaagtaatttctcatcttctactcaccgtttcaagtctccactatttatcattccattctttacattctgattttcatttactaggtgtattagtctgtttttgcattgctttaaagaaatacctgagactgagtattaaacaggtttaacctgttttctttatgaattcttctttaattggctcatggttctgcacgctgtacagaaagcatagcagcatctgcttctggggaggcctcaggaagcctccaatcatggctgaaggcaaaaggggagcatggtgagaatgggagcaagaaagagaaggagtggtggggagaaggtgccacccacttttaaatgccagctcacttaccaccaagaggatggcccaagccattcatgtgggatctgcccccatgattcaagcttcttccaccaggccccacctctagcactggggattacaattcaacctgagatttgggagggaaagatatccaaactatatcactaggtctggatcttgttatttattttttggaacatagtcatatatatccaaggatatatattgtagaagtccacagaaccatactaatattggacttctgcttagttaggtcttatctatctgaaacatgatattcatattgcagagaagattattttctttagtgattgaggaaatctttactacttatacatttttaatataatactataatatttgaagatgcacattttagatgtagtttaattgaaacctggaaatactattaatttgctttttaaagtcctaaaatcaggattatcagattctgaattaatggagtttaaatcaaaaagattacaaggcagtttttcagttttattctggttaattttatcacagctttggaatcctactttgtttatttgcttcttgaagttagatttcccagtgaaatttcagtatcacataaagtcttatgaaatggctcattgcactttgaactttgagtcaaggaagtgaaatttattgatagattgttggtgtaatatttatcctgtttgtggtagcttttttgaataataagtgtcttagaagaccatgttggagtagcctgcatgcttttatcaaacatattaattatgtgatggctgatactgctttagatattacatagaaatagtagtaggtgtttactaaactgg

SEQ ID NO: 908 - DNA, 4047 bp, Homo sapiens
acaggtttaacctgttttctttatgaattcttctttaattggctcatggttctgcacgctgtacagaaagcatagcagcatctgcttctggggaggcctcaggaagcctccaatcatggctgaaggcaaaaggggagcatggtgagaatgggagcaagaaagagaaggagtggtggggagaaggtgccacccacttttaaatgccagctcacttaccaccaagaggatggcccaagccattcatgtgggatctgcccccatgattcaagcttcttccaccaggccccacctctagcactggggattacaattcaacctgagatttgggagggaaagatatccaaactatatcactaggtctggatcttgttatttattttttggaacatagtcatatatatccaaggatatatattgtagaagtccacagaaccatactaatattggacttctgcttagttaggtcttatctatctgaaacatgatattcatattgcagagaagattattttctttagtgattgaggaaatctttactacttatacatttttaatataatactataatatttgaagatgcacattttagatgtagtttaattgaaacctggaaatactattaatttgctttttaaagtcctaaaatcaggattatcagattctgaattaatggagtttaaatcaaaaagattacaaggcagtttttcagttttattctggttaattttatcacagctttggaatcctactttgtttatttgcttcttgaagttagatttcccagtgaaatttcagtatcacataaagtcttatgaaatggctcattgcactttgaactttgagtcaaggaagtgaaatttattgatagattgttggtgtaatatttatcctgtttgtggtagcttttttgaataataagtgtcttagaagaccatgttggagtagcctgcatgcttttatcaaacatattaattatgtgatggctgatactgctttagatattacatagaaatagtagtaggtgtttactaaactggaaatttcatttaacttggtttagctttgccttgttctcagtcacattgataaaaatgtaagacttttgtttatcttttagaataatgacaccttttggtgctgagaattttttgttttatatatatatatatatatacgtaatataaatacaaaatatatttaaatatgtataatatttctcatacactttatgtaactttgtgttcctgtttctctattatcttggcatgttttcttcaaatggcacttcttaacctcctaaggttaataaatttctttgtaatggacttttgttttctaattcctcagcgtatgacaaatgaattatactttgtcaaattatttaggtaactttcagtttttgaagtcctgggatcataacattcatcagtctttaatttctgtcattaaggtcattagctataaatgaatttatgagtagatttaaaaaataaaacatacaatccttcccttaacacactttcccaccatttggttcaactgctagtgtaaaagcatgatgaattttgagaagttatattttaccagttactttattttttaccagttatttaaaacagacatgagccaaagccagaatacttgttaatgaaaatgaggtgttttggaggaaaggaaggttgtgctgcagtttttacttgaaatctgttacatttctttacagaaatttcaaatctcttgtttcctgttatgatggtggcattatatacctttaaaatgtgagctataggaaaatgaatgatggttaattttttaataaatatttagacttgtgtttttgaaattttttataacattgttataggttttatcctctttctcttgtgaacatgtagtgatttgtattttgtgatctttgccgcatgctagagacttaagaatactatagcaaatatctgtcttctttacatttaaaaatttttcgtgactactccctgttgatatctgtcttaaaagttacttttgatgtagttcacaaatgtaccagataattatttcatcgtttttaatgcttaaagtttttatttgtattaggatttttagtatgattttaatgttaaagttttgaagttactctgccactagaagtctaattttgggacttactattcatgaaataggaattgacttttatataagtaataggaccttattttgaaggttcaaactggagaaaatcttacattgtttatatttttatttcatttatttcagttgatttgcttgagatcaagattgcagatacagaatccatatttcgtgtatattgctgatattaatcattaaaatcgtttttgacagtttgacagttaaaggcatttcctgtgaaataatactggtatgtatttaaccatgcagatcctcagtttgtggtctgccagctaaaggtgaagatatattcctccaattcaggacccacacgacgggaagacaagttcatgtactttgagttccctcagccgttacctgtgtgtggtgatatcaaagtagagttcttccacaaacagaacaagatgctaaaaaaggtttgtactttactttcattgggagaaatatccaaaataaggacagattaaaagctatattttattttatgacatgtaaggaactataatttgttttctattagatctgcaggtgttttgcttactctggcattggtgagacattataagggtaaataatcctgtttgaaggaaaaggccttatggcattgtaacatgagaggaatttttcttaacaaggatggttaactgagaagaaattagcatgggaccaatattttaaaaattttggtctataggtagaaatgagatctgttctgtggtcttatgtagtgacacaaaccactttttctccattttggcttatgtttctttttctttccttttttttttttttcctttttgttagagacagggtcttgttctattgcccaggctgagtagctaagactacaagcatgtgccaccacacccagctaattttttttatttttatttttgtagggacagggtctcactatgttgcccaggctggtctcaaactcctgggcacaagcagtcctcacgctttggcatcccaaagagttggaattacaggtgtgcgccatcatgcctggccttaacgtttcttaagacttgattattttctatttagcttctgtggatttactgattaattttttaactaggagagaaatcagtatgaagaggaagtaataaagaatgaaaacatggtatttaaatgtgcaggtttagaaagttaatgaagtttgaatttgattgatctgtatttagagaaggcaacgtcttattattttaaaaccaactatccgccctgtgcggtggctcacgcctgtaattccagcactttgggaggctgaggtgggcagatcagctgaggtcaggagttcgagaccagcctggccaacatggttaaaccccatctctactaaaaatacaaaaaaattagccgggtgtggtggcaggcgcctgttttcccagctactcaggaggcttgaggcaggataattgctgaacccgagaggcggaggttgcagtaagccaagaatgcaccattgtactccagcctgggcaacaagagtgaaactccatctcaaaaaaaaagaaaaaaaaaacaacaactatcttcatttaaaatattaaatgtgaatatttaaagtgagactaaggtgcaacatttttagatagtaatgaagaaaaggactaactttgtagtgttgctgccttgttaaacatactagatagcatattgccaatctttaaacattctcaatgataggatttatttactttttctgatttttagcttttcttttgaaagaaaataagaggaagtttcatttactgcaaaattttaaatgctgctttgatgtatcagtagagatataattttcctttatccagaatccaagtagctggaaaaaaaaatcaaaatatgctgaacttttttttttttagccag

SEQ ID NO: 909 - DNA, 4048 bp, Homo sapiens
aaaattagccgggtgtggtggcaggcgcctgttttcccagctactcaggaggcttgaggcaggataattgctgaacccgagaggcggaggttgcagtaagccaagaatgcaccattgtactccagcctgggcaacaagagtgaaactccatctcaaaaaaaaagaaaaaaaaaacaacaactatcttcatttaaaatattaaatgtgaatatttaaagtgagactaaggtgcaacatttttagatagtaatgaagaaaaggactaactttgtagtgttgctgccttgttaaacatactagatagcatattgccaatctttaaacattctcaatgataggatttatttactttttctgatttttagcttttcttttgaaagaaaataagaggaagtttcatttactgcaaaattttaaatgctgctttgatgtatcagtagagatataattttcctttatccagaatccaagtagctggaaaaaaaaatcaaaatatgctgaacttttttttttttagccagaaacccatttcctatcgtctgtacaaataaaagttaaatatatctcaataacttagaaaaattattttttgataatccaggaagtattagcaactgttttaaaattaagataactagtaagttttatttagctttcaaaaataggcatctacatcatcatctctgcatacctttaggaatttcctaattcttatttcccttcatctgtactttaacacatgcaaaattgaaggttagattaaatatttatgatttatttgtttatccttgactacataaatttccattttattgattttccctgccttatttaagaatatgctatgattaaaacacaaaaaattttagtataacccatatatatatagaattcacctttttgttatttaaatattattggcttattttcttctaagtaaaatacaattactggctaaaataattgaaataagcaaaaaaaaaattttaaagaccttgtatacaagattactttgccaggtactgttaaaagatgcaatgacatttaagacgtaacatccttaaggatcttattttctgggggataaaaaactttaagataaattagaataaaagatttaaatggcattttaaggtaccaggtaccagataagatgtcacaaggctgtatatcattaattgccaaatgatttatacaggccagatttctttgttggtcaatagaggtttaaagtgatgaacttctgttgtgtttttttattaagaaggtattatcttattagtaagaagtgattttttttaagaacaagcattttataacatcaaaagaaatcagtagtactctttcctaccccctcatatttattctgaaagtattcaagcattatattgtcatgtaagaaactggagcttctcatgtttgtattgctgtagaagtaaacatgtatttgccatgcgtcatcagggaagttgcactcaccgtccaagaacttttgttaaagtaaatcttggaataggtagctcatttgaaatgtagaaaaaattaaatccatatctgaattttgtttatatgtatgtacacgtaaactaaaaacgtatttaaagctagtattagatgagaaaagaggtttttttacttaaaattttaaggcaaaagtagtttatcttagatcttgtgagattgtatttttggtttaaaatttgagaatttgagtgaagaaaaatcatgtgaatgaaaatgcaacagataactcagattgccttataatagtctttgtgtttacctttattcagaatatcaaatgatagtttattttgttgactttttgcaaatgtttaacataggtgacagattttcttttttaaaaaaataaaacatcattaattaaatatgtcatttcatttctttttcttttctttttttttttttttaggacaaaatgtttcacttttgggtaaatacattcttcataccaggaccagaggaaacctcagaaaaagtagaaaatggaagtctatgtgatcaagaaatcgatagcatttgcagtatagagcgtgcagataatgacaaggaatatctagtacttactttaacaaaaaatgatcttgacaaagcaaataaagacaaagccaaccgatacttttctccaaattttaaggtcagttaaattaaacattttgtgggggttgttgacttgtatgtatgtgatgtgtgtttaattctaggagtacagctgatgaagaacttgcttgacaagtttttaacttatgtattatttcgaagcagtgtttacgtagcagtaacatgaaagtttctaataaaatacccaatgtacacagcgtcaaaaaagctgcatttttccttttcctaattcttcgttgtttgctgaaatctggggcaaaggtgcgggagggggctaaatgactgggatatgaagtaggaatgggagaggaaagaaatagatgggaactcagtcatttgggaatgattcatatggaatgtttttactgcttccactcctgtctgccttccaatttattctcaatccctcagagtgatcttaaaaatagacttgattgtgtcacttctgtttacactttataaggaccttgtgtttttttttttaccatgacctacaaggcccagcataatttagcacagggctacctcctacatcagcactagtcaccttctctccttgtttcttgagattcagtcatactggtctttcttcagttcttcaaaatgctaagcttctgcctcttctagtctttccagttattttccttctccctgtaccttttcatctcagccttttcccctgaccttccatagctatcttcatatttccagccttagcttcaatctcatattctctgaagtcctttgattgtcctcccgttattctttttttaaaaatcctatttccttatattgtatcttagaattatttggtttgtttcatttttgcctatgtgtgatatatgtatttctacataggtatatatatctacttatagacaagaattcttcagattaaaaaaatctgatttgtaaacattcccaagtggttgtttaccatttttttcttcccccttcctatttcttattctacctgattttcccctgttcattcaccacactcgtttctttctcttttttactctctcttaatttttcattcaatttttataacatgtaataaatctaactgtagcgtctgagtattaagaatattgctagtaatacttcacctgtaatcccagcactttgggaggctaaggcaggcggatcacttgaggcccaggagtttaagaccagccggccaatatggcgaaaccctatctgcactacaaatacaaaaattagctgggcatggtgtcgcacacctgtaatcccagctacttgggaggctgaggcacaagaattgcttgagcctgtgagatggaggttgcagtgagccgagatcacaccagtgcacgtgcacttcagcctgggcaacagagcaagactctgtcttaaaaaaaaaaaaaaaaaaaaaatatatacacacacacacacacacacacacacacacacacactattactaccaatatacatacatatatgtatgtatgtatgtatgtatattggtagtaatagtaatacttgggcccctgcacgttttaagtgaaaatagatctaatattaaatgtctttagcccttaaattttttttaagtgttcagaagtttccctttaaaaaaatttttaatatataataattgtacatatttatgggatacagagtgatattttcatgtatgcagtgtgtgatgatcaaatcaggataattagcatatggatcacctcaaacatttgtcatttctttgtgttaggaacattcaaaattctgtcttctagctatttgaaaatatacagtaaattattgttgactagttacagttctatagaacactataatttattcctcctgtgtgtaattttttatcttttaaccaacatctccctatcctcccctcccactccctttcccggcctctaata

SEQ ID NO: 910 - DNA, 4050 bp, Homo sapiens
cagcactagtcaccttctctccttgtttcttgagattcagtcatactggtctttcttcagttcttcaaaatgctaagcttctgcctcttctagtctttccagttattttccttctccctgtaccttttcatctcagccttttcccctgaccttccatagctatcttcatatttccagccttagcttcaatctcatattctctgaagtcctttgattgtcctcccgttattctttttttaaaaatcctatttccttatattgtatcttagaattatttggtttgtttcatttttgcctatgtgtgatatatgtatttctacataggtatatatatctacttatagacaagaattcttcagattaaaaaaatctgatttgtaaacattcccaagtggttgtttaccatttttttcttcccccttcctatttcttattctacctgattttcccctgttcattcaccacactcgtttctttctcttttttactctctcttaatttttcattcaatttttataacatgtaataaatctaactgtagcgtctgagtattaagaatattgctagtaatacttcacctgtaatcccagcactttgggaggctaaggcaggcggatcacttgaggcccaggagtttaagaccagccggccaatatggcgaaaccctatctgcactacaaatacaaaaattagctgggcatggtgtcgcacacctgtaatcccagctacttgggaggctgaggcacaagaattgcttgagcctgtgagatggaggttgcagtgagccgagatcacaccagtgcacgtgcacttcagcctgggcaacagagcaagactctgtcttaaaaaaaaaaaaaaaaaaaaaatatatacacacacacacacacacacacacacacacacacactattactaccaatatacatacatatatgtatgtatgtatgtatgtatattggtagtaatagtaatacttgggcccctgcacgttttaagtgaaaatagatctaatattaaatgtctttagcccttaaattttttttaagtgttcagaagtttccctttaaaaaaatttttaatatataataattgtacatatttatgggatacagagtgatattttcatgtatgcagtgtgtgatgatcaaatcaggataattagcatatggatcacctcaaacatttgtcatttctttgtgttaggaacattcaaaattctgtcttctagctatttgaaaatatacagtaaattattgttgactagttacagttctatagaacactataatttattcctcctgtgtgtaattttttatcttttaaccaacatctccctatcctcccctcccactccctttcccggcctctaataaccacactcttatgagctcaacttttttagcttccatatatgagtgagaacatacggtatttatctttctgtacctgacttattttacttaacatcatgtcctccgggctagacattctctttagaatccacaggtttcctttcttttctctaaatctgcattttgctcagccattaacttttaaaatgtctttttccctttagttttattgttttctattttaatattgcaagatgttttatatttgtgattacaaataaaaactccattattagtaaacaaatacaatgtcatatagtagtaagtgctataaaaaatagacaggatagaaagtaatcttggtttgtatgttttttgttttttagcaaagatgattagagaaggcccaaccaagcagataacatttaagcagaggcctaaatcatataagtgagttatacaaatatctgggaaaagagttaagagtacagatgcaaaagcccttagacaagagaatgagcttggtatatctgaagagtggataagtcattttgactgaaacagagtggacaagaaaaccagtccaagtgtaaagacactagtgtgtgttcagcataggaaggatgtaatctgaattttgtgtttaatattccctgtgttcatgctttcaaaatacagatgagtgaggaaagtagggagaaggggtaataaaggaagctgagagatcagttaagaggtacttgaatagtttagtaaagatgagagaagatgtttgcttcttgttgcccctcactgcttagaatagtggcagtgaagggtaacaagaagctgtcagattaacttaaagagtttactgatgcagtggatgttggttgtaagagaagaattgataatgactcttggataataggggagggaggggctgtcaatataatataatgaagaagggatttgaagtcatttctgatttaaatctcacatccactacctacttttaatagatatgtagcctttaacaagttccctaacctttctgggccttagctacctccccttggaaatggaaatacctaacatgtaaggttgttttgacagttattttcactaggcatgtaaaggcacttgactctctgttatagaccactgtattatgttaatgtccctctccttcctccctttaggtaaagtttttagggctaataaatcccaaatatcaatgttgatcagtagtttgtgtttgtgtagtgttgtttatatcaaaaactacattgaagccgggcacagtggttcacgcctaaaatcgcaacactttgggaggccaaggtgggcctcccaccttgaactaaggagtttgagaccagcctgggcaacatggtgaaatcccatctctacaaaaaatataaaagctagctgggtgtggtggcatgcacctgtagtcctagctacttgggaggctgaggttgatcctgggagtttgagcctgcagtgagctgtgaagatgccactgcactctagtctgggtgacagagcaagaccctgtctcaaaaacacacacacacacacacacacacacaaagaaatacattgatttttcacataggtagtaagagaaacattctttttgaactcagctgtttgtgaattgaattttgtaattcaaatgctatattatgtaaactattgatgactttcaatctgcatttattttgtataattatttagttaatatttgccacttatattccttaaaaaataaaattgaggttgggcgtggtggctcacacttgtaatcccagcactttgggaggctgaggcaggcagattgcctgagctcaggagtttgagatcagcctgggcaacatcatgaaccccatttctactaaaatacaaaaaattatctgggcatggtggtgtacacctgtagccctagctgtttgggaggctaaggcacgagaattgcttgaacccgggaggcagaggttgcagtgagccaagatcatgccactgcactccagcttggcaacagagcaagactcttgtctccagaaataaaaataaataaattgtattaacatcctgatagtttatctgtttagtacctagcaagaaagaaaatgttgaacatcttaagaagagggtcatttaaaaggcctcttaaagatcatgtttgttacagtgcttaaaaattaatatgttcatctgcaaaatggaataaaaaatctgttaaaaatatatttcactaaatagtttaagatgagtcatatttgtgggttttcattttaaattttctttctctaggtgaagctgtacttcacaaaaacagtagaggagccgtcaaatccagaggctagcagttcaacttctgtaacaccagatgttagtgacaatgaacctgatcattatagatattctgacaccactgactctgatccagagaatgaaccttttgatgaagatcagcatacacaaattacaaaagtctgaatttttttttatcaagagggataaaacaccatgaaaataaacttgaataaactgaaaatggacctttttttttttaatggcaataggacattgtgtcagattaccagttataggaacaattctcttttcctgaccaatcttgttttaccctatacatccacagggttttgacacttgttgtccagttgaaaaaaggttgtgtagctgtgtcatg

SEQ ID NO: 911 - DNA, 4046 bp, Homo sapiens
tgcttcttgttgcccctcactgcttagaatagtggcagtgaagggtaacaagaagctgtcagattaacttaaagagtttactgatgcagtggatgttggttgtaagagaagaattgataatgactcttggataataggggagggaggggctgtcaatataatataatgaagaagggatttgaagtcatttctgatttaaatctcacatccactacctacttttaatagatatgtagcctttaacaagttccctaacctttctgggccttagctacctccccttggaaatggaaatacctaacatgtaaggttgttttgacagttattttcactaggcatgtaaaggcacttgactctctgttatagaccactgtattatgttaatgtccctctccttcctccctttaggtaaagtttttagggctaataaatcccaaatatcaatgttgatcagtagtttgtgtttgtgtagtgttgtttatatcaaaaactacattgaagccgggcacagtggttcacgcctaaaatcgcaacactttgggaggccaaggtgggcctcccaccttgaactaaggagtttgagaccagcctgggcaacatggtgaaatcccatctctacaaaaaatataaaagctagctgggtgtggtggcatgcacctgtagtcctagctacttgggaggctgaggttgatcctgggagtttgagcctgcagtgagctgtgaagatgccactgcactctagtctgggtgacagagcaagaccctgtctcaaaaacacacacacacacacacacacacacaaagaaatacattgatttttcacataggtagtaagagaaacattctttttgaactcagctgtttgtgaattgaattttgtaattcaaatgctatattatgtaaactattgatgactttcaatctgcatttattttgtataattatttagttaatatttgccacttatattccttaaaaaataaaattgaggttgggcgtggtggctcacacttgtaatcccagcactttgggaggctgaggcaggcagattgcctgagctcaggagtttgagatcagcctgggcaacatcatgaaccccatttctactaaaatacaaaaaattatctgggcatggtggtgtacacctgtagccctagctgtttgggaggctaaggcacgagaattgcttgaacccgggaggcagaggttgcagtgagccaagatcatgccactgcactccagcttggcaacagagcaagactcttgtctccagaaataaaaataaataaattgtattaacatcctgatagtttatctgtttagtacctagcaagaaagaaaatgttgaacatcttaagaagagggtcatttaaaaggcctcttaaagatcatgtttgttacagtgcttaaaaattaatatgttcatctgcaaaatggaataaaaaatctgttaaaaatatatttcactaaatagtttaagatgagtcatatttgtgggttttcattttaaattttctttctctaggtgaagctgtacttcacaaaaacagtagaggagccgtcaaatccagaggctagcagttcaacttctgtaacaccagatgttagtgacaatgaacctgatcattatagatattctgacaccactgactctgatccagagaatgaaccttttgatgaagatcagcatacacaaattacaaaagtctgaatttttttttatcaagagggataaaacaccatgaaaataaacttgaataaactgaaaatggacctttttttttttaatggcaataggacattgtgtcagattaccagttataggaacaattctcttttcctgaccaatcttgttttaccctatacatccacagggttttgacacttgttgtccagttgaaaaaaggttgtgtagctgtgtcatgtatatacctttttgtgtcaaaaggacatttaaaattcaattaggattaataaagatggcactttcccgttttattccagttttataaaaagtggagacagactgatgtgtatacgtaggaattttttccttttgtgttctgtcaccaactgaagtggctaaagagctttgtgatatactggttcacatcctacccctttgcacttgtggcaacagataagtttgcagttggctaagagaggtttccgaagggttttgctacattctaatgcatgtattcgggttaggggaatggagggaatgctcagaaaggaaataattttatgctggactctggaccatataccatctccagctatttacacacacctttctttagcatgctacagttattaatctggacattcgaggaattggccgctgtcactgcttgttgtttgcgcatttttttttaaagcatattggtgctagaaaaggcagctaaaggaagtgaatctgtattggggtacaggaatgaaccttctgcaacatcttaagatccacaaatgaagggatataaaaataatgtcataggtaagaaacacagcaacaatgacttaaccatataaatgtggaggctatcaacaaagaatgggcttgaaacattataaaaattgacaatgatttattaaatatgttttctcaattgtaacgacttctccatctcctgtgtaatcaaggccagtgctaaaattcagatgctgttagtacctacatcagtcaacaacttacacttattttactagttttcaatcataatacctgctgtggatgcttcatgtgctgcctgcaagcttcttttttctcattaaatataaaatattttgtaatgctgcacagaaattttcaatttgagattctacagtaagcgttttttttctttgaagatttatgatgcacttattcaatagctgtcagccgttccacccttttgaccttacacattctattacaatgaattttgcagttttgcacattttttaaatgtcattaactgttagggaattttacttgaatactgaatacatataatgtttatattaaaaaggacatttgtgttaaaaaggaaattagagttgcagtaaactttcaatgctgcacacaaaaaaaagacatttgatttttcagtagaaattgtcctacatgtgctttattgatttgctattgaaagaatagggtttttttttttttttttttttttttttttaaatgtgcagtgttgaatcatttcttcatagtgctcccccgagttgggactagggcttcaatttcacttcttaaaaaaaatcatcatatatttgatatgcccagactgcatacgattttaagcggagtacaactactattgtaaagctaatgtgaagatattattaaaaaggtttttttttccagaaatttggtgtcttcaaattataccttcaccttgacatttgaatatccagccattttgtttcttaatggtataaaattccattttcaataacttattggtgctgaaattgttcactagctgtggtctgacctagttaatttacaaatacagattgaataggacctactagagcagcatttatagagtttgatggcaaatagattaggcagaacttcatctaaaatattcttagtaaataatgttgacacgttttccataccttgtcagtttcattcaacaatttttaaatttttaacaaagctcttaggatttacacatttatatttaaacattgatatatagagtattgattgattgctcataagttaaattggtaaagttagagacaactattctaacacctcaccattgaaatttatatgccaccttgtctttcataaaagctgaaaattgttacctaaaatgaaaatcaacttcatgttttgaagatagttataaatattgttctttgttacaatttcgggcaccgcatattaaaacgtaactttattgttccaatatgtaacatggagggccaggtcataaataatgacattataatgggcttttgcactgttattatttttcctttggaatgtgaaggtctgaatgagggttttgattttgaatgtttcaatgtttttgagaagc

SEQ ID NO: 912 - DNA, 4041 bp, Homo sapiens
ttgtaagagaagaattgataatgactcttggataataggggagggaggggctgtcaatataatataatgaagaagggatttgaagtcatttctgatttaaatctcacatccactacctacttttaatagatatgtagcctttaacaagttccctaacctttctgggccttagctacctccccttggaaatggaaatacctaacatgtaaggttgttttgacagttattttcactaggcatgtaaaggcacttgactctctgttatagaccactgtattatgttaatgtccctctccttcctccctttaggtaaagtttttagggctaataaatcccaaatatcaatgttgatcagtagtttgtgtttgtgtagtgttgtttatatcaaaaactacattgaagccgggcacagtggttcacgcctaaaatcgcaacactttgggaggccaaggtgggcctcccaccttgaactaaggagtttgagaccagcctgggcaacatggtgaaatcccatctctacaaaaaatataaaagctagctgggtgtggtggcatgcacctgtagtcctagctacttgggaggctgaggttgatcctgggagtttgagcctgcagtgagctgtgaagatgccactgcactctagtctgggtgacagagcaagaccctgtctcaaaaacacacacacacacacacacacacacaaagaaatacattgatttttcacataggtagtaagagaaacattctttttgaactcagctgtttgtgaattgaattttgtaattcaaatgctatattatgtaaactattgatgactttcaatctgcatttattttgtataattatttagttaatatttgccacttatattccttaaaaaataaaattgaggttgggcgtggtggctcacacttgtaatcccagcactttgggaggctgaggcaggcagattgcctgagctcaggagtttgagatcagcctgggcaacatcatgaaccccatttctactaaaatacaaaaaattatctgggcatggtggtgtacacctgtagccctagctgtttgggaggctaaggcacgagaattgcttgaacccgggaggcagaggttgcagtgagccaagatcatgccactgcactccagcttggcaacagagcaagactcttgtctccagaaataaaaataaataaattgtattaacatcctgatagtttatctgtttagtacctagcaagaaagaaaatgttgaacatcttaagaagagggtcatttaaaaggcctcttaaagatcatgtttgttacagtgcttaaaaattaatatgttcatctgcaaaatggaataaaaaatctgttaaaaatatatttcactaaatagtttaagatgagtcatatttgtgggttttcattttaaattttctttctctaggtgaagctgtacttcacaaaaacagtagaggagccgtcaaatccagaggctagcagttcaacttctgtaacaccagatgttagtgacaatgaacctgatcattatagatattctgacaccactgactctgatccagagaatgaaccttttgatgaagatcagcatacacaaattacaaaagtctgaatttttttttatcaagagggataaaacaccatgaaaataaacttgaataaactgaaaatggacctttttttttttaatggcaataggacattgtgtcagattaccagttataggaacaattctcttttcctgaccaatcttgttttaccctatacatccacagggttttgacacttgttgtccagttgaaaaaaggttgtgtagctgtgtcatgtatatacctttttgtgtcaaaaggacatttaaaattcaattaggattaataaagatggcactttcccgttttattccagttttataaaaagtggagacagactgatgtgtatacgtaggaattttttccttttgtgttctgtcaccaactgaagtggctaaagagctttgtgatatactggttcacatcctacccctttgcacttgtggcaacagataagtttgcagttggctaagagaggtttccgaagggttttgctacattctaatgcatgtattcgggttaggggaatggagggaatgctcagaaaggaaataattttatgctggactctggaccatataccatctccagctatttacacacacctttctttagcatgctacagttattaatctggacattcgaggaattggccgctgtcactgcttgttgtttgcgcatttttttttaaagcatattggtgctagaaaaggcagctaaaggaagtgaatctgtattggggtacaggaatgaaccttctgcaacatcttaagatccacaaatgaagggatataaaaataatgtcataggtaagaaacacagcaacaatgacttaaccatataaatgtggaggctatcaacaaagaatgggcttgaaacattataaaaattgacaatgatttattaaatatgttttctcaattgtaacgacttctccatctcctgtgtaatcaaggccagtgctaaaattcagatgctgttagtacctacatcagtcaacaacttacacttattttactagttttcaatcataatacctgctgtggatgcttcatgtgctgcctgcaagcttcttttttctcattaaatataaaatattttgtaatgctgcacagaaattttcaatttgagattctacagtaagcgttttttttctttgaagatttatgatgcacttattcaatagctgtcagccgttccacccttttgaccttacacattctattacaatgaattttgcagttttgcacattttttaaatgtcattaactgttagggaattttacttgaatactgaatacatataatgtttatattaaaaaggacatttgtgttaaaaaggaaattagagttgcagtaaactttcaatgctgcacacaaaaaaaagacatttgatttttcagtagaaattgtcctacatgtgctttattgatttgctattgaaagaatagggtttttttttttttttttttttttttttttaaatgtgcagtgttgaatcatttcttcatagtgctcccccgagttgggactagggcttcaatttcacttcttaaaaaaaatcatcatatatttgatatgcccagactgcatacgattttaagcggagtacaactactattgtaaagctaatgtgaagatattattaaaaaggtttttttttccagaaatttggtgtcttcaaattataccttcaccttgacatttgaatatccagccattttgtttcttaatggtataaaattccattttcaataacttattggtgctgaaattgttcactagctgtggtctgacctagttaatttacaaatacagattgaataggacctactagagcagcatttatagagtttgatggcaaatagattaggcagaacttcatctaaaatattcttagtaaataatgttgacacgttttccataccttgtcagtttcattcaacaatttttaaatttttaacaaagctcttaggatttacacatttatatttaaacattgatatatagagtattgattgattgctcataagttaaattggtaaagttagagacaactattctaacacctcaccattgaaatttatatgccaccttgtctttcataaaagctgaaaattgttacctaaaatgaaaatcaacttcatgttttgaagatagttataaatattgttctttgttacaatttcgggcaccgcatattaaaacgtaactttattgttccaatatgtaacatggagggccaggtcataaataatgacattataatgggcttttgcactgttattatttttcctttggaatgtgaaggtctgaatgagggttttgattttgaatgtttcaatgtttttgagaagccttgcttacattttatggtgtagtcattggaaatggaaaaatggcattatatatattatatatataaatatatattatacatactctccttact

SEQ ID NO: 913 - DNA, 4046 bp, Homo sapiens
catgtaaggttgttttgacagttattttcactaggcatgtaaaggcacttgactctctgttatagaccactgtattatgttaatgtccctctccttcctccctttaggtaaagtttttagggctaataaatcccaaatatcaatgttgatcagtagtttgtgtttgtgtagtgttgtttatatcaaaaactacattgaagccgggcacagtggttcacgcctaaaatcgcaacactttgggaggccaaggtgggcctcccaccttgaactaaggagtttgagaccagcctgggcaacatggtgaaatcccatctctacaaaaaatataaaagctagctgggtgtggtggcatgcacctgtagtcctagctacttgggaggctgaggttgatcctgggagtttgagcctgcagtgagctgtgaagatgccactgcactctagtctgggtgacagagcaagaccctgtctcaaaaacacacacacacacacacacacacacaaagaaatacattgatttttcacataggtagtaagagaaacattctttttgaactcagctgtttgtgaattgaattttgtaattcaaatgctatattatgtaaactattgatgactttcaatctgcatttattttgtataattatttagttaatatttgccacttatattccttaaaaaataaaattgaggttgggcgtggtggctcacacttgtaatcccagcactttgggaggctgaggcaggcagattgcctgagctcaggagtttgagatcagcctgggcaacatcatgaaccccatttctactaaaatacaaaaaattatctgggcatggtggtgtacacctgtagccctagctgtttgggaggctaaggcacgagaattgcttgaacccgggaggcagaggttgcagtgagccaagatcatgccactgcactccagcttggcaacagagcaagactcttgtctccagaaataaaaataaataaattgtattaacatcctgatagtttatctgtttagtacctagcaagaaagaaaatgttgaacatcttaagaagagggtcatttaaaaggcctcttaaagatcatgtttgttacagtgcttaaaaattaatatgttcatctgcaaaatggaataaaaaatctgttaaaaatatatttcactaaatagtttaagatgagtcatatttgtgggttttcattttaaattttctttctctaggtgaagctgtacttcacaaaaacagtagaggagccgtcaaatccagaggctagcagttcaacttctgtaacaccagatgttagtgacaatgaacctgatcattatagatattctgacaccactgactctgatccagagaatgaaccttttgatgaagatcagcatacacaaattacaaaagtctgaatttttttttatcaagagggataaaacaccatgaaaataaacttgaataaactgaaaatggacctttttttttttaatggcaataggacattgtgtcagattaccagttataggaacaattctcttttcctgaccaatcttgttttaccctatacatccacagggttttgacacttgttgtccagttgaaaaaaggttgtgtagctgtgtcatgtatatacctttttgtgtcaaaaggacatttaaaattcaattaggattaataaagatggcactttcccgttttattccagttttataaaaagtggagacagactgatgtgtatacgtaggaattttttccttttgtgttctgtcaccaactgaagtggctaaagagctttgtgatatactggttcacatcctacccctttgcacttgtggcaacagataagtttgcagttggctaagagaggtttccgaagggttttgctacattctaatgcatgtattcgggttaggggaatggagggaatgctcagaaaggaaataattttatgctggactctggaccatataccatctccagctatttacacacacctttctttagcatgctacagttattaatctggacattcgaggaattggccgctgtcactgcttgttgtttgcgcatttttttttaaagcatattggtgctagaaaaggcagctaaaggaagtgaatctgtattggggtacaggaatgaaccttctgcaacatcttaagatccacaaatgaagggatataaaaataatgtcataggtaagaaacacagcaacaatgacttaaccatataaatgtggaggctatcaacaaagaatgggcttgaaacattataaaaattgacaatgatttattaaatatgttttctcaattgtaacgacttctccatctcctgtgtaatcaaggccagtgctaaaattcagatgctgttagtacctacatcagtcaacaacttacacttattttactagttttcaatcataatacctgctgtggatgcttcatgtgctgcctgcaagcttcttttttctcattaaatataaaatattttgtaatgctgcacagaaattttcaatttgagattctacagtaagcgttttttttctttgaagatttatgatgcacttattcaatagctgtcagccgttccacccttttgaccttacacattctattacaatgaattttgcagttttgcacattttttaaatgtcattaactgttagggaattttacttgaatactgaatacatataatgtttatattaaaaaggacatttgtgttaaaaaggaaattagagttgcagtaaactttcaatgctgcacacaaaaaaaagacatttgatttttcagtagaaattgtcctacatgtgctttattgatttgctattgaaagaatagggtttttttttttttttttttttttttttttaaatgtgcagtgttgaatcatttcttcatagtgctcccccgagttgggactagggcttcaatttcacttcttaaaaaaaatcatcatatatttgatatgcccagactgcatacgattttaagcggagtacaactactattgtaaagctaatgtgaagatattattaaaaaggtttttttttccagaaatttggtgtcttcaaattataccttcaccttgacatttgaatatccagccattttgtttcttaatggtataaaattccattttcaataacttattggtgctgaaattgttcactagctgtggtctgacctagttaatttacaaatacagattgaataggacctactagagcagcatttatagagtttgatggcaaatagattaggcagaacttcatctaaaatattcttagtaaataatgttgacacgttttccataccttgtcagtttcattcaacaatttttaaatttttaacaaagctcttaggatttacacatttatatttaaacattgatatatagagtattgattgattgctcataagttaaattggtaaagttagagacaactattctaacacctcaccattgaaatttatatgccaccttgtctttcataaaagctgaaaattgttacctaaaatgaaaatcaacttcatgttttgaagatagttataaatattgttctttgttacaatttcgggcaccgcatattaaaacgtaactttattgttccaatatgtaacatggagggccaggtcataaataatgacattataatgggcttttgcactgttattatttttcctttggaatgtgaaggtctgaatgagggttttgattttgaatgtttcaatgtttttgagaagccttgcttacattttatggtgtagtcattggaaatggaaaaatggcattatatatattatatatataaatatatattatacatactctccttactttatttcagttaccatccccatagaatttgacaagaattgctatgactgaaaggttttcgagtcctaattaaaactttatttatggcagtattcataattagcctgaaatgcattctgtaggtaatctctgagtttctggaatattttcttagactttttggatgtgcagcagcttacatgtctgaagttacttgaaggcatcactt

SEQ ID NO: 914 - DNA, 4035 bp, Homo sapiens
tttttcacataggtagtaagagaaacattctttttgaactcagctgtttgtgaattgaattttgtaattcaaatgctatattatgtaaactattgatgactttcaatctgcatttattttgtataattatttagttaatatttgccacttatattccttaaaaaataaaattgaggttgggcgtggtggctcacacttgtaatcccagcactttgggaggctgaggcaggcagattgcctgagctcaggagtttgagatcagcctgggcaacatcatgaaccccatttctactaaaatacaaaaaattatctgggcatggtggtgtacacctgtagccctagctgtttgggaggctaaggcacgagaattgcttgaacccgggaggcagaggttgcagtgagccaagatcatgccactgcactccagcttggcaacagagcaagactcttgtctccagaaataaaaataaataaattgtattaacatcctgatagtttatctgtttagtacctagcaagaaagaaaatgttgaacatcttaagaagagggtcatttaaaaggcctcttaaagatcatgtttgttacagtgcttaaaaattaatatgttcatctgcaaaatggaataaaaaatctgttaaaaatatatttcactaaatagtttaagatgagtcatatttgtgggttttcattttaaattttctttctctaggtgaagctgtacttcacaaaaacagtagaggagccgtcaaatccagaggctagcagttcaacttctgtaacaccagatgttagtgacaatgaacctgatcattatagatattctgacaccactgactctgatccagagaatgaaccttttgatgaagatcagcatacacaaattacaaaagtctgaatttttttttatcaagagggataaaacaccatgaaaataaacttgaataaactgaaaatggacctttttttttttaatggcaataggacattgtgtcagattaccagttataggaacaattctcttttcctgaccaatcttgttttaccctatacatccacagggttttgacacttgttgtccagttgaaaaaaggttgtgtagctgtgtcatgtatatacctttttgtgtcaaaaggacatttaaaattcaattaggattaataaagatggcactttcccgttttattccagttttataaaaagtggagacagactgatgtgtatacgtaggaattttttccttttgtgttctgtcaccaactgaagtggctaaagagctttgtgatatactggttcacatcctacccctttgcacttgtggcaacagataagtttgcagttggctaagagaggtttccgaagggttttgctacattctaatgcatgtattcgggttaggggaatggagggaatgctcagaaaggaaataattttatgctggactctggaccatataccatctccagctatttacacacacctttctttagcatgctacagttattaatctggacattcgaggaattggccgctgtcactgcttgttgtttgcgcatttttttttaaagcatattggtgctagaaaaggcagctaaaggaagtgaatctgtattggggtacaggaatgaaccttctgcaacatcttaagatccacaaatgaagggatataaaaataatgtcataggtaagaaacacagcaacaatgacttaaccatataaatgtggaggctatcaacaaagaatgggcttgaaacattataaaaattgacaatgatttattaaatatgttttctcaattgtaacgacttctccatctcctgtgtaatcaaggccagtgctaaaattcagatgctgttagtacctacatcagtcaacaacttacacttattttactagttttcaatcataatacctgctgtggatgcttcatgtgctgcctgcaagcttcttttttctcattaaatataaaatattttgtaatgctgcacagaaattttcaatttgagattctacagtaagcgttttttttctttgaagatttatgatgcacttattcaatagctgtcagccgttccacccttttgaccttacacattctattacaatgaattttgcagttttgcacattttttaaatgtcattaactgttagggaattttacttgaatactgaatacatataatgtttatattaaaaaggacatttgtgttaaaaaggaaattagagttgcagtaaactttcaatgctgcacacaaaaaaaagacatttgatttttcagtagaaattgtcctacatgtgctttattgatttgctattgaaagaatagggtttttttttttttttttttttttttttttaaatgtgcagtgttgaatcatttcttcatagtgctcccccgagttgggactagggcttcaatttcacttcttaaaaaaaatcatcatatatttgatatgcccagactgcatacgattttaagcggagtacaactactattgtaaagctaatgtgaagatattattaaaaaggtttttttttccagaaatttggtgtcttcaaattataccttcaccttgacatttgaatatccagccattttgtttcttaatggtataaaattccattttcaataacttattggtgctgaaattgttcactagctgtggtctgacctagttaatttacaaatacagattgaataggacctactagagcagcatttatagagtttgatggcaaatagattaggcagaacttcatctaaaatattcttagtaaataatgttgacacgttttccataccttgtcagtttcattcaacaatttttaaatttttaacaaagctcttaggatttacacatttatatttaaacattgatatatagagtattgattgattgctcataagttaaattggtaaagttagagacaactattctaacacctcaccattgaaatttatatgccaccttgtctttcataaaagctgaaaattgttacctaaaatgaaaatcaacttcatgttttgaagatagttataaatattgttctttgttacaatttcgggcaccgcatattaaaacgtaactttattgttccaatatgtaacatggagggccaggtcataaataatgacattataatgggcttttgcactgttattatttttcctttggaatgtgaaggtctgaatgagggttttgattttgaatgtttcaatgtttttgagaagccttgcttacattttatggtgtagtcattggaaatggaaaaatggcattatatatattatatatataaatatatattatacatactctccttactttatttcagttaccatccccatagaatttgacaagaattgctatgactgaaaggttttcgagtcctaattaaaactttatttatggcagtattcataattagcctgaaatgcattctgtaggtaatctctgagtttctggaatattttcttagactttttggatgtgcagcagcttacatgtctgaagttacttgaaggcatcacttttaagaaagcttacagttgggccctgtaccatcccaagtcctttgtagctcctcttgaacatgtttgccatacttttaaaagggtagttgaataaatagcatcaccattctttgctgtggcacaggttataaacttaagtggagtttaccggcagcatcaaatgtttcagctttaaaaaataaaagtagggtacaagtttaatgtttagttctagaaattttgtgcaatatgttcataacgatggctgtggttgccacaaagtgcctcgtttacctttaaatactgttaatgtgtcatgcatgcagatggaaggggtggaactgtgcactaaagtgggggctttaactgtagtatttggcagagttgccttctacctgccagttcaaaagttcaacctgttttcatatagaatatatatactaaaaaatttcagtctgttaaacagccttactctgattcagcctcttcagatactcttgtgctgtgcagcagtggctctgtg

SEQ ID NO: 915 - DNA, 4069 bp, Homo sapiens
tatctgggcatggtggtgtacacctgtagccctagctgtttgggaggctaaggcacgagaattgcttgaacccgggaggcagaggttgcagtgagccaagatcatgccactgcactccagcttggcaacagagcaagactcttgtctccagaaataaaaataaataaattgtattaacatcctgatagtttatctgtttagtacctagcaagaaagaaaatgttgaacatcttaagaagagggtcatttaaaaggcctcttaaagatcatgtttgttacagtgcttaaaaattaatatgttcatctgcaaaatggaataaaaaatctgttaaaaatatatttcactaaatagtttaagatgagtcatatttgtgggttttcattttaaattttctttctctaggtgaagctgtacttcacaaaaacagtagaggagccgtcaaatccagaggctagcagttcaacttctgtaacaccagatgttagtgacaatgaacctgatcattatagatattctgacaccactgactctgatccagagaatgaaccttttgatgaagatcagcatacacaaattacaaaagtctgaatttttttttatcaagagggataaaacaccatgaaaataaacttgaataaactgaaaatggacctttttttttttaatggcaataggacattgtgtcagattaccagttataggaacaattctcttttcctgaccaatcttgttttaccctatacatccacagggttttgacacttgttgtccagttgaaaaaaggttgtgtagctgtgtcatgtatatacctttttgtgtcaaaaggacatttaaaattcaattaggattaataaagatggcactttcccgttttattccagttttataaaaagtggagacagactgatgtgtatacgtaggaattttttccttttgtgttctgtcaccaactgaagtggctaaagagctttgtgatatactggttcacatcctacccctttgcacttgtggcaacagataagtttgcagttggctaagagaggtttccgaagggttttgctacattctaatgcatgtattcgggttaggggaatggagggaatgctcagaaaggaaataattttatgctggactctggaccatataccatctccagctatttacacacacctttctttagcatgctacagttattaatctggacattcgaggaattggccgctgtcactgcttgttgtttgcgcatttttttttaaagcatattggtgctagaaaaggcagctaaaggaagtgaatctgtattggggtacaggaatgaaccttctgcaacatcttaagatccacaaatgaagggatataaaaataatgtcataggtaagaaacacagcaacaatgacttaaccatataaatgtggaggctatcaacaaagaatgggcttgaaacattataaaaattgacaatgatttattaaatatgttttctcaattgtaacgacttctccatctcctgtgtaatcaaggccagtgctaaaattcagatgctgttagtacctacatcagtcaacaacttacacttattttactagttttcaatcataatacctgctgtggatgcttcatgtgctgcctgcaagcttcttttttctcattaaatataaaatattttgtaatgctgcacagaaattttcaatttgagattctacagtaagcgttttttttctttgaagatttatgatgcacttattcaatagctgtcagccgttccacccttttgaccttacacattctattacaatgaattttgcagttttgcacattttttaaatgtcattaactgttagggaattttacttgaatactgaatacatataatgtttatattaaaaaggacatttgtgttaaaaaggaaattagagttgcagtaaactttcaatgctgcacacaaaaaaaagacatttgatttttcagtagaaattgtcctacatgtgctttattgatttgctattgaaagaatagggtttttttttttttttttttttttttttttaaatgtgcagtgttgaatcatttcttcatagtgctcccccgagttgggactagggcttcaatttcacttcttaaaaaaaatcatcatatatttgatatgcccagactgcatacgattttaagcggagtacaactactattgtaaagctaatgtgaagatattattaaaaaggtttttttttccagaaatttggtgtcttcaaattataccttcaccttgacatttgaatatccagccattttgtttcttaatggtataaaattccattttcaataacttattggtgctgaaattgttcactagctgtggtctgacctagttaatttacaaatacagattgaataggacctactagagcagcatttatagagtttgatggcaaatagattaggcagaacttcatctaaaatattcttagtaaataatgttgacacgttttccataccttgtcagtttcattcaacaatttttaaatttttaacaaagctcttaggatttacacatttatatttaaacattgatatatagagtattgattgattgctcataagttaaattggtaaagttagagacaactattctaacacctcaccattgaaatttatatgccaccttgtctttcataaaagctgaaaattgttacctaaaatgaaaatcaacttcatgttttgaagatagttataaatattgttctttgttacaatttcgggcaccgcatattaaaacgtaactttattgttccaatatgtaacatggagggccaggtcataaataatgacattataatgggcttttgcactgttattatttttcctttggaatgtgaaggtctgaatgagggttttgattttgaatgtttcaatgtttttgagaagccttgcttacattttatggtgtagtcattggaaatggaaaaatggcattatatatattatatatataaatatatattatacatactctccttactttatttcagttaccatccccatagaatttgacaagaattgctatgactgaaaggttttcgagtcctaattaaaactttatttatggcagtattcataattagcctgaaatgcattctgtaggtaatctctgagtttctggaatattttcttagactttttggatgtgcagcagcttacatgtctgaagttacttgaaggcatcacttttaagaaagcttacagttgggccctgtaccatcccaagtcctttgtagctcctcttgaacatgtttgccatacttttaaaagggtagttgaataaatagcatcaccattctttgctgtggcacaggttataaacttaagtggagtttaccggcagcatcaaatgtttcagctttaaaaaataaaagtagggtacaagtttaatgtttagttctagaaattttgtgcaatatgttcataacgatggctgtggttgccacaaagtgcctcgtttacctttaaatactgttaatgtgtcatgcatgcagatggaaggggtggaactgtgcactaaagtgggggctttaactgtagtatttggcagagttgccttctacctgccagttcaaaagttcaacctgttttcatatagaatatatatactaaaaaatttcagtctgttaaacagccttactctgattcagcctcttcagatactcttgtgctgtgcagcagtggctctgtgtgtaaatgctatgcactgaggatacacaaaaataccaatatgatgtgtacaggataatgcctcatcccaatcagatgtccatttgttattgtgtttgttaacaaccctttatctcttagtgttataaactccacttaaaactgattaaagtctcattcttgtcattgtgtgggtgttttattaaatgagagtttataattcaaattgcttaagtccattgaagttttaattaatgggcagccaaatgtgaatacaaagttttcagtttttttttttcctgctgtccttcaaagcctactgtttaaaaaaaaaaaaaaaaaaaaacatggcctgagagtaga

SEQ ID NO: 916 - DNA, 4042 bp, Homo sapiens
tataaaaagtggagacagactgatgtgtatacgtaggaattttttccttttgtgttctgtcaccaactgaagtggctaaagagctttgtgatatactggttcacatcctacccctttgcacttgtggcaacagataagtttgcagttggctaagagaggtttccgaagggttttgctacattctaatgcatgtattcgggttaggggaatggagggaatgctcagaaaggaaataattttatgctggactctggaccatataccatctccagctatttacacacacctttctttagcatgctacagttattaatctggacattcgaggaattggccgctgtcactgcttgttgtttgcgcatttttttttaaagcatattggtgctagaaaaggcagctaaaggaagtgaatctgtattggggtacaggaatgaaccttctgcaacatcttaagatccacaaatgaagggatataaaaataatgtcataggtaagaaacacagcaacaatgacttaaccatataaatgtggaggctatcaacaaagaatgggcttgaaacattataaaaattgacaatgatttattaaatatgttttctcaattgtaacgacttctccatctcctgtgtaatcaaggccagtgctaaaattcagatgctgttagtacctacatcagtcaacaacttacacttattttactagttttcaatcataatacctgctgtggatgcttcatgtgctgcctgcaagcttcttttttctcattaaatataaaatattttgtaatgctgcacagaaattttcaatttgagattctacagtaagcgttttttttctttgaagatttatgatgcacttattcaatagctgtcagccgttccacccttttgaccttacacattctattacaatgaattttgcagttttgcacattttttaaatgtcattaactgttagggaattttacttgaatactgaatacatataatgtttatattaaaaaggacatttgtgttaaaaaggaaattagagttgcagtaaactttcaatgctgcacacaaaaaaaagacatttgatttttcagtagaaattgtcctacatgtgctttattgatttgctattgaaagaatagggtttttttttttttttttttttttttttttaaatgtgcagtgttgaatcatttcttcatagtgctcccccgagttgggactagggcttcaatttcacttcttaaaaaaaatcatcatatatttgatatgcccagactgcatacgattttaagcggagtacaactactattgtaaagctaatgtgaagatattattaaaaaggtttttttttccagaaatttggtgtcttcaaattataccttcaccttgacatttgaatatccagccattttgtttcttaatggtataaaattccattttcaataacttattggtgctgaaattgttcactagctgtggtctgacctagttaatttacaaatacagattgaataggacctactagagcagcatttatagagtttgatggcaaatagattaggcagaacttcatctaaaatattcttagtaaataatgttgacacgttttccataccttgtcagtttcattcaacaatttttaaatttttaacaaagctcttaggatttacacatttatatttaaacattgatatatagagtattgattgattgctcataagttaaattggtaaagttagagacaactattctaacacctcaccattgaaatttatatgccaccttgtctttcataaaagctgaaaattgttacctaaaatgaaaatcaacttcatgttttgaagatagttataaatattgttctttgttacaatttcgggcaccgcatattaaaacgtaactttattgttccaatatgtaacatggagggccaggtcataaataatgacattataatgggcttttgcactgttattatttttcctttggaatgtgaaggtctgaatgagggttttgattttgaatgtttcaatgtttttgagaagccttgcttacattttatggtgtagtcattggaaatggaaaaatggcattatatatattatatatataaatatatattatacatactctccttactttatttcagttaccatccccatagaatttgacaagaattgctatgactgaaaggttttcgagtcctaattaaaactttatttatggcagtattcataattagcctgaaatgcattctgtaggtaatctctgagtttctggaatattttcttagactttttggatgtgcagcagcttacatgtctgaagttacttgaaggcatcacttttaagaaagcttacagttgggccctgtaccatcccaagtcctttgtagctcctcttgaacatgtttgccatacttttaaaagggtagttgaataaatagcatcaccattctttgctgtggcacaggttataaacttaagtggagtttaccggcagcatcaaatgtttcagctttaaaaaataaaagtagggtacaagtttaatgtttagttctagaaattttgtgcaatatgttcataacgatggctgtggttgccacaaagtgcctcgtttacctttaaatactgttaatgtgtcatgcatgcagatggaaggggtggaactgtgcactaaagtgggggctttaactgtagtatttggcagagttgccttctacctgccagttcaaaagttcaacctgttttcatatagaatatatatactaaaaaatttcagtctgttaaacagccttactctgattcagcctcttcagatactcttgtgctgtgcagcagtggctctgtgtgtaaatgctatgcactgaggatacacaaaaataccaatatgatgtgtacaggataatgcctcatcccaatcagatgtccatttgttattgtgtttgttaacaaccctttatctcttagtgttataaactccacttaaaactgattaaagtctcattcttgtcattgtgtgggtgttttattaaatgagagtttataattcaaattgcttaagtccattgaagttttaattaatgggcagccaaatgtgaatacaaagttttcagtttttttttttcctgctgtccttcaaagcctactgtttaaaaaaaaaaaaaaaaaaaaacatggcctgagagtagagtatctgtctactcatgtttaattaaggaaaaacacttatttttagggctttagtcatcacttcataaattgtataagcacattaaatagcgttctagtcctgaaaaagtccaagattcttagaaaattgtgcatatttttattatgacagatgtttgaagataattccccagaatggatttgatactttagatttcaattttgtggcttttgtctattattctgtactctgccatcagcatatggaaagcttcatttactcatcatgacttgtgccatataaaaattgatatttcggaatagtctaaaggactttttgtacttgaatttaatcatgttgtttctaatattcttaaaagcttgaagactaaagcatatcctttcaacaaagcatagtaaggtaataagaaagtgtagtttgtacaagtgttaaaaaaataaagtagacaatgttacagtgggacttattatttcaagtttacattttctccatgtaattttttaaaaagtaaatgaaaaaatgtgcaataatgtaaaatatgaagtgtatgtgtacacacattttatttttcggtatcttgggtatacgtatggttgaaaactatactggagtctaaaagtattctaatttataagaagacattttggtgatgtttgaaaaatagaaatgtgctagttttgtttttatatcatgtcctttgtacgttgtaatatgagctggcttggttcagtaaatgccatcaccatttccattgagaatttaaaactcaccagtgtttaatatgcaggcttccaaaggcttatgaaaaaaatcaagacccttaaatctagttaatttgctgctaacatgaaactctt

SEQ ID NO: 917 - DNA, 4042 bp, Homo sapiens
taaaaagtggagacagactgatgtgtatacgtaggaattttttccttttgtgttctgtcaccaactgaagtggctaaagagctttgtgatatactggttcacatcctacccctttgcacttgtggcaacagataagtttgcagttggctaagagaggtttccgaagggttttgctacattctaatgcatgtattcgggttaggggaatggagggaatgctcagaaaggaaataattttatgctggactctggaccatataccatctccagctatttacacacacctttctttagcatgctacagttattaatctggacattcgaggaattggccgctgtcactgcttgttgtttgcgcatttttttttaaagcatattggtgctagaaaaggcagctaaaggaagtgaatctgtattggggtacaggaatgaaccttctgcaacatcttaagatccacaaatgaagggatataaaaataatgtcataggtaagaaacacagcaacaatgacttaaccatataaatgtggaggctatcaacaaagaatgggcttgaaacattataaaaattgacaatgatttattaaatatgttttctcaattgtaacgacttctccatctcctgtgtaatcaaggccagtgctaaaattcagatgctgttagtacctacatcagtcaacaacttacacttattttactagttttcaatcataatacctgctgtggatgcttcatgtgctgcctgcaagcttcttttttctcattaaatataaaatattttgtaatgctgcacagaaattttcaatttgagattctacagtaagcgttttttttctttgaagatttatgatgcacttattcaatagctgtcagccgttccacccttttgaccttacacattctattacaatgaattttgcagttttgcacattttttaaatgtcattaactgttagggaattttacttgaatactgaatacatataatgtttatattaaaaaggacatttgtgttaaaaaggaaattagagttgcagtaaactttcaatgctgcacacaaaaaaaagacatttgatttttcagtagaaattgtcctacatgtgctttattgatttgctattgaaagaatagggtttttttttttttttttttttttttttttaaatgtgcagtgttgaatcatttcttcatagtgctcccccgagttgggactagggcttcaatttcacttcttaaaaaaaatcatcatatatttgatatgcccagactgcatacgattttaagcggagtacaactactattgtaaagctaatgtgaagatattattaaaaaggtttttttttccagaaatttggtgtcttcaaattataccttcaccttgacatttgaatatccagccattttgtttcttaatggtataaaattccattttcaataacttattggtgctgaaattgttcactagctgtggtctgacctagttaatttacaaatacagattgaataggacctactagagcagcatttatagagtttgatggcaaatagattaggcagaacttcatctaaaatattcttagtaaataatgttgacacgttttccataccttgtcagtttcattcaacaatttttaaatttttaacaaagctcttaggatttacacatttatatttaaacattgatatatagagtattgattgattgctcataagttaaattggtaaagttagagacaactattctaacacctcaccattgaaatttatatgccaccttgtctttcataaaagctgaaaattgttacctaaaatgaaaatcaacttcatgttttgaagatagttataaatattgttctttgttacaatttcgggcaccgcatattaaaacgtaactttattgttccaatatgtaacatggagggccaggtcataaataatgacattataatgggcttttgcactgttattatttttcctttggaatgtgaaggtctgaatgagggttttgattttgaatgtttcaatgtttttgagaagccttgcttacattttatggtgtagtcattggaaatggaaaaatggcattatatatattatatatataaatatatattatacatactctccttactttatttcagttaccatccccatagaatttgacaagaattgctatgactgaaaggttttcgagtcctaattaaaactttatttatggcagtattcataattagcctgaaatgcattctgtaggtaatctctgagtttctggaatattttcttagactttttggatgtgcagcagcttacatgtctgaagttacttgaaggcatcacttttaagaaagcttacagttgggccctgtaccatcccaagtcctttgtagctcctcttgaacatgtttgccatacttttaaaagggtagttgaataaatagcatcaccattctttgctgtggcacaggttataaacttaagtggagtttaccggcagcatcaaatgtttcagctttaaaaaataaaagtagggtacaagtttaatgtttagttctagaaattttgtgcaatatgttcataacgatggctgtggttgccacaaagtgcctcgtttacctttaaatactgttaatgtgtcatgcatgcagatggaaggggtggaactgtgcactaaagtgggggctttaactgtagtatttggcagagttgccttctacctgccagttcaaaagttcaacctgttttcatatagaatatatatactaaaaaatttcagtctgttaaacagccttactctgattcagcctcttcagatactcttgtgctgtgcagcagtggctctgtgtgtaaatgctatgcactgaggatacacaaaaataccaatatgatgtgtacaggataatgcctcatcccaatcagatgtccatttgttattgtgtttgttaacaaccctttatctcttagtgttataaactccacttaaaactgattaaagtctcattcttgtcattgtgtgggtgttttattaaatgagagtttataattcaaattgcttaagtccattgaagttttaattaatgggcagccaaatgtgaatacaaagttttcagtttttttttttcctgctgtccttcaaagcctactgtttaaaaaaaaaaaaaaaaaaaaacatggcctgagagtagagtatctgtctactcatgtttaattaaggaaaaacacttatttttagggctttagtcatcacttcataaattgtataagcacattaaatagcgttctagtcctgaaaaagtccaagattcttagaaaattgtgcatatttttattatgacagatgtttgaagataattccccagaatggatttgatactttagatttcaattttgtggcttttgtctattattctgtactctgccatcagcatatggaaagcttcatttactcatcatgacttgtgccatataaaaattgatatttcggaatagtctaaaggactttttgtacttgaatttaatcatgttgtttctaatattcttaaaagcttgaagactaaagcatatcctttcaacaaagcatagtaaggtaataagaaagtgtagtttgtacaagtgttaaaaaaataaagtagacaatgttacagtgggacttattatttcaagtttacattttctccatgtaattttttaaaaagtaaatgaaaaaatgtgcaataatgtaaaatatgaagtgtatgtgtacacacattttatttttcggtatcttgggtatacgtatggttgaaaactatactggagtctaaaagtattctaatttataagaagacattttggtgatgtttgaaaaatagaaatgtgctagttttgtttttatatcatgtcctttgtacgttgtaatatgagctggcttggttcagtaaatgccatcaccatttccattgagaatttaaaactcaccagtgtttaatatgcaggcttccaaaggcttatgaaaaaaatcaagacccttaaatctagttaatttgctgctaacatgaaactctttg

SEQ ID NO: 918 - DNA, 4046 bp, Homo sapiens
aattgtaacgacttctccatctcctgtgtaatcaaggccagtgctaaaattcagatgctgttagtacctacatcagtcaacaacttacacttattttactagttttcaatcataatacctgctgtggatgcttcatgtgctgcctgcaagcttcttttttctcattaaatataaaatattttgtaatgctgcacagaaattttcaatttgagattctacagtaagcgttttttttctttgaagatttatgatgcacttattcaatagctgtcagccgttccacccttttgaccttacacattctattacaatgaattttgcagttttgcacattttttaaatgtcattaactgttagggaattttacttgaatactgaatacatataatgtttatattaaaaaggacatttgtgttaaaaaggaaattagagttgcagtaaactttcaatgctgcacacaaaaaaaagacatttgatttttcagtagaaattgtcctacatgtgctttattgatttgctattgaaagaatagggtttttttttttttttttttttttttttttaaatgtgcagtgttgaatcatttcttcatagtgctcccccgagttgggactagggcttcaatttcacttcttaaaaaaaatcatcatatatttgatatgcccagactgcatacgattttaagcggagtacaactactattgtaaagctaatgtgaagatattattaaaaaggtttttttttccagaaatttggtgtcttcaaattataccttcaccttgacatttgaatatccagccattttgtttcttaatggtataaaattccattttcaataacttattggtgctgaaattgttcactagctgtggtctgacctagttaatttacaaatacagattgaataggacctactagagcagcatttatagagtttgatggcaaatagattaggcagaacttcatctaaaatattcttagtaaataatgttgacacgttttccataccttgtcagtttcattcaacaatttttaaatttttaacaaagctcttaggatttacacatttatatttaaacattgatatatagagtattgattgattgctcataagttaaattggtaaagttagagacaactattctaacacctcaccattgaaatttatatgccaccttgtctttcataaaagctgaaaattgttacctaaaatgaaaatcaacttcatgttttgaagatagttataaatattgttctttgttacaatttcgggcaccgcatattaaaacgtaactttattgttccaatatgtaacatggagggccaggtcataaataatgacattataatgggcttttgcactgttattatttttcctttggaatgtgaaggtctgaatgagggttttgattttgaatgtttcaatgtttttgagaagccttgcttacattttatggtgtagtcattggaaatggaaaaatggcattatatatattatatatataaatatatattatacatactctccttactttatttcagttaccatccccatagaatttgacaagaattgctatgactgaaaggttttcgagtcctaattaaaactttatttatggcagtattcataattagcctgaaatgcattctgtaggtaatctctgagtttctggaatattttcttagactttttggatgtgcagcagcttacatgtctgaagttacttgaaggcatcacttttaagaaagcttacagttgggccctgtaccatcccaagtcctttgtagctcctcttgaacatgtttgccatacttttaaaagggtagttgaataaatagcatcaccattctttgctgtggcacaggttataaacttaagtggagtttaccggcagcatcaaatgtttcagctttaaaaaataaaagtagggtacaagtttaatgtttagttctagaaattttgtgcaatatgttcataacgatggctgtggttgccacaaagtgcctcgtttacctttaaatactgttaatgtgtcatgcatgcagatggaaggggtggaactgtgcactaaagtgggggctttaactgtagtatttggcagagttgccttctacctgccagttcaaaagttcaacctgttttcatatagaatatatatactaaaaaatttcagtctgttaaacagccttactctgattcagcctcttcagatactcttgtgctgtgcagcagtggctctgtgtgtaaatgctatgcactgaggatacacaaaaataccaatatgatgtgtacaggataatgcctcatcccaatcagatgtccatttgttattgtgtttgttaacaaccctttatctcttagtgttataaactccacttaaaactgattaaagtctcattcttgtcattgtgtgggtgttttattaaatgagagtttataattcaaattgcttaagtccattgaagttttaattaatgggcagccaaatgtgaatacaaagttttcagtttttttttttcctgctgtccttcaaagcctactgtttaaaaaaaaaaaaaaaaaaaaacatggcctgagagtagagtatctgtctactcatgtttaattaaggaaaaacacttatttttagggctttagtcatcacttcataaattgtataagcacattaaatagcgttctagtcctgaaaaagtccaagattcttagaaaattgtgcatatttttattatgacagatgtttgaagataattccccagaatggatttgatactttagatttcaattttgtggcttttgtctattattctgtactctgccatcagcatatggaaagcttcatttactcatcatgacttgtgccatataaaaattgatatttcggaatagtctaaaggactttttgtacttgaatttaatcatgttgtttctaatattcttaaaagcttgaagactaaagcatatcctttcaacaaagcatagtaaggtaataagaaagtgtagtttgtacaagtgttaaaaaaataaagtagacaatgttacagtgggacttattatttcaagtttacattttctccatgtaattttttaaaaagtaaatgaaaaaatgtgcaataatgtaaaatatgaagtgtatgtgtacacacattttatttttcggtatcttgggtatacgtatggttgaaaactatactggagtctaaaagtattctaatttataagaagacattttggtgatgtttgaaaaatagaaatgtgctagttttgtttttatatcatgtcctttgtacgttgtaatatgagctggcttggttcagtaaatgccatcaccatttccattgagaatttaaaactcaccagtgtttaatatgcaggcttccaaaggcttatgaaaaaaatcaagacccttaaatctagttaatttgctgctaacatgaaactctttggttcttttatttttgccagataattagacacacatctaaagcttagtcttaaatggcttaagtgtagctattgattagtgctgttgctagttcagaaagaaatgtttgtgaatggaaacaagaatattcagtccaaactgttgtaaggacagtacctgaaaaccaggaaacaggataatggaaaaagtcttttaaagatgaaatgttggagccaactttcttatagaattaattgtatgtggctatagaaagcctaatgattgttgcttatttttgagagcatattattcttttatgaccataatcttgctgtttttccatcttccaaaagatcttccttctaatatgtatatcagaatgtgggtagccagtcagacaaattcatattggttggtagctttaaaaagtttgtaatgtgaagacaggaaaggacaaaatagtttgctttggtggtagtactctggttgttaagctaggtattttgagactacttccccatcacaacaacaataaaataatcactcataatcctatcacctggagacatagccatcgttaatatgttagtgactatacaatcatgttttcttctgtatatccat

SEQ ID NO: 919 - DNA, 4044 bp, Homo sapiens
attgtaacgacttctccatctcctgtgtaatcaaggccagtgctaaaattcagatgctgttagtacctacatcagtcaacaacttacacttattttactagttttcaatcataatacctgctgtggatgcttcatgtgctgcctgcaagcttcttttttctcattaaatataaaatattttgtaatgctgcacagaaattttcaatttgagattctacagtaagcgttttttttctttgaagatttatgatgcacttattcaatagctgtcagccgttccacccttttgaccttacacattctattacaatgaattttgcagttttgcacattttttaaatgtcattaactgttagggaattttacttgaatactgaatacatataatgtttatattaaaaaggacatttgtgttaaaaaggaaattagagttgcagtaaactttcaatgctgcacacaaaaaaaagacatttgatttttcagtagaaattgtcctacatgtgctttattgatttgctattgaaagaatagggtttttttttttttttttttttttttttttaaatgtgcagtgttgaatcatttcttcatagtgctcccccgagttgggactagggcttcaatttcacttcttaaaaaaaatcatcatatatttgatatgcccagactgcatacgattttaagcggagtacaactactattgtaaagctaatgtgaagatattattaaaaaggtttttttttccagaaatttggtgtcttcaaattataccttcaccttgacatttgaatatccagccattttgtttcttaatggtataaaattccattttcaataacttattggtgctgaaattgttcactagctgtggtctgacctagttaatttacaaatacagattgaataggacctactagagcagcatttatagagtttgatggcaaatagattaggcagaacttcatctaaaatattcttagtaaataatgttgacacgttttccataccttgtcagtttcattcaacaatttttaaatttttaacaaagctcttaggatttacacatttatatttaaacattgatatatagagtattgattgattgctcataagttaaattggtaaagttagagacaactattctaacacctcaccattgaaatttatatgccaccttgtctttcataaaagctgaaaattgttacctaaaatgaaaatcaacttcatgttttgaagatagttataaatattgttctttgttacaatttcgggcaccgcatattaaaacgtaactttattgttccaatatgtaacatggagggccaggtcataaataatgacattataatgggcttttgcactgttattatttttcctttggaatgtgaaggtctgaatgagggttttgattttgaatgtttcaatgtttttgagaagccttgcttacattttatggtgtagtcattggaaatggaaaaatggcattatatatattatatatataaatatatattatacatactctccttactttatttcagttaccatccccatagaatttgacaagaattgctatgactgaaaggttttcgagtcctaattaaaactttatttatggcagtattcataattagcctgaaatgcattctgtaggtaatctctgagtttctggaatattttcttagactttttggatgtgcagcagcttacatgtctgaagttacttgaaggcatcacttttaagaaagcttacagttgggccctgtaccatcccaagtcctttgtagctcctcttgaacatgtttgccatacttttaaaagggtagttgaataaatagcatcaccattctttgctgtggcacaggttataaacttaagtggagtttaccggcagcatcaaatgtttcagctttaaaaaataaaagtagggtacaagtttaatgtttagttctagaaattttgtgcaatatgttcataacgatggctgtggttgccacaaagtgcctcgtttacctttaaatactgttaatgtgtcatgcatgcagatggaaggggtggaactgtgcactaaagtgggggctttaactgtagtatttggcagagttgccttctacctgccagttcaaaagttcaacctgttttcatatagaatatatatactaaaaaatttcagtctgttaaacagccttactctgattcagcctcttcagatactcttgtgctgtgcagcagtggctctgtgtgtaaatgctatgcactgaggatacacaaaaataccaatatgatgtgtacaggataatgcctcatcccaatcagatgtccatttgttattgtgtttgttaacaaccctttatctcttagtgttataaactccacttaaaactgattaaagtctcattcttgtcattgtgtgggtgttttattaaatgagagtttataattcaaattgcttaagtccattgaagttttaattaatgggcagccaaatgtgaatacaaagttttcagtttttttttttcctgctgtccttcaaagcctactgtttaaaaaaaaaaaaaaaaaaaaacatggcctgagagtagagtatctgtctactcatgtttaattaaggaaaaacacttatttttagggctttagtcatcacttcataaattgtataagcacattaaatagcgttctagtcctgaaaaagtccaagattcttagaaaattgtgcatatttttattatgacagatgtttgaagataattccccagaatggatttgatactttagatttcaattttgtggcttttgtctattattctgtactctgccatcagcatatggaaagcttcatttactcatcatgacttgtgccatataaaaattgatatttcggaatagtctaaaggactttttgtacttgaatttaatcatgttgtttctaatattcttaaaagcttgaagactaaagcatatcctttcaacaaagcatagtaaggtaataagaaagtgtagtttgtacaagtgttaaaaaaataaagtagacaatgttacagtgggacttattatttcaagtttacattttctccatgtaattttttaaaaagtaaatgaaaaaatgtgcaataatgtaaaatatgaagtgtatgtgtacacacattttatttttcggtatcttgggtatacgtatggttgaaaactatactggagtctaaaagtattctaatttataagaagacattttggtgatgtttgaaaaatagaaatgtgctagttttgtttttatatcatgtcctttgtacgttgtaatatgagctggcttggttcagtaaatgccatcaccatttccattgagaatttaaaactcaccagtgtttaatatgcaggcttccaaaggcttatgaaaaaaatcaagacccttaaatctagttaatttgctgctaacatgaaactctttggttcttttatttttgccagataattagacacacatctaaagcttagtcttaaatggcttaagtgtagctattgattagtgctgttgctagttcagaaagaaatgtttgtgaatggaaacaagaatattcagtccaaactgttgtaaggacagtacctgaaaaccaggaaacaggataatggaaaaagtcttttaaagatgaaatgttggagccaactttcttatagaattaattgtatgtggctatagaaagcctaatgattgttgcttatttttgagagcatattattcttttatgaccataatcttgctgtttttccatcttccaaaagatcttccttctaatatgtatatcagaatgtgggtagccagtcagacaaattcatattggttggtagctttaaaaagtttgtaatgtgaagacaggaaaggacaaaatagtttgctttggtggtagtactctggttgttaagctaggtattttgagactacttccccatcacaacaacaataaaataatcactcataatcctatcacctggagacatagccatcgttaatatgttagtgactatacaatcatgttttcttctgtatatcca

SEQ ID NO: 920 - DNA, 4044 bp, Homo sapiens
tgtaacgacttctccatctcctgtgtaatcaaggccagtgctaaaattcagatgctgttagtacctacatcagtcaacaacttacacttattttactagttttcaatcataatacctgctgtggatgcttcatgtgctgcctgcaagcttcttttttctcattaaatataaaatattttgtaatgctgcacagaaattttcaatttgagattctacagtaagcgttttttttctttgaagatttatgatgcacttattcaatagctgtcagccgttccacccttttgaccttacacattctattacaatgaattttgcagttttgcacattttttaaatgtcattaactgttagggaattttacttgaatactgaatacatataatgtttatattaaaaaggacatttgtgttaaaaaggaaattagagttgcagtaaactttcaatgctgcacacaaaaaaaagacatttgatttttcagtagaaattgtcctacatgtgctttattgatttgctattgaaagaatagggtttttttttttttttttttttttttttttaaatgtgcagtgttgaatcatttcttcatagtgctcccccgagttgggactagggcttcaatttcacttcttaaaaaaaatcatcatatatttgatatgcccagactgcatacgattttaagcggagtacaactactattgtaaagctaatgtgaagatattattaaaaaggtttttttttccagaaatttggtgtcttcaaattataccttcaccttgacatttgaatatccagccattttgtttcttaatggtataaaattccattttcaataacttattggtgctgaaattgttcactagctgtggtctgacctagttaatttacaaatacagattgaataggacctactagagcagcatttatagagtttgatggcaaatagattaggcagaacttcatctaaaatattcttagtaaataatgttgacacgttttccataccttgtcagtttcattcaacaatttttaaatttttaacaaagctcttaggatttacacatttatatttaaacattgatatatagagtattgattgattgctcataagttaaattggtaaagttagagacaactattctaacacctcaccattgaaatttatatgccaccttgtctttcataaaagctgaaaattgttacctaaaatgaaaatcaacttcatgttttgaagatagttataaatattgttctttgttacaatttcgggcaccgcatattaaaacgtaactttattgttccaatatgtaacatggagggccaggtcataaataatgacattataatgggcttttgcactgttattatttttcctttggaatgtgaaggtctgaatgagggttttgattttgaatgtttcaatgtttttgagaagccttgcttacattttatggtgtagtcattggaaatggaaaaatggcattatatatattatatatataaatatatattatacatactctccttactttatttcagttaccatccccatagaatttgacaagaattgctatgactgaaaggttttcgagtcctaattaaaactttatttatggcagtattcataattagcctgaaatgcattctgtaggtaatctctgagtttctggaatattttcttagactttttggatgtgcagcagcttacatgtctgaagttacttgaaggcatcacttttaagaaagcttacagttgggccctgtaccatcccaagtcctttgtagctcctcttgaacatgtttgccatacttttaaaagggtagttgaataaatagcatcaccattctttgctgtggcacaggttataaacttaagtggagtttaccggcagcatcaaatgtttcagctttaaaaaataaaagtagggtacaagtttaatgtttagttctagaaattttgtgcaatatgttcataacgatggctgtggttgccacaaagtgcctcgtttacctttaaatactgttaatgtgtcatgcatgcagatggaaggggtggaactgtgcactaaagtgggggctttaactgtagtatttggcagagttgccttctacctgccagttcaaaagttcaacctgttttcatatagaatatatatactaaaaaatttcagtctgttaaacagccttactctgattcagcctcttcagatactcttgtgctgtgcagcagtggctctgtgtgtaaatgctatgcactgaggatacacaaaaataccaatatgatgtgtacaggataatgcctcatcccaatcagatgtccatttgttattgtgtttgttaacaaccctttatctcttagtgttataaactccacttaaaactgattaaagtctcattcttgtcattgtgtgggtgttttattaaatgagagtttataattcaaattgcttaagtccattgaagttttaattaatgggcagccaaatgtgaatacaaagttttcagtttttttttttcctgctgtccttcaaagcctactgtttaaaaaaaaaaaaaaaaaaaaacatggcctgagagtagagtatctgtctactcatgtttaattaaggaaaaacacttatttttagggctttagtcatcacttcataaattgtataagcacattaaatagcgttctagtcctgaaaaagtccaagattcttagaaaattgtgcatatttttattatgacagatgtttgaagataattccccagaatggatttgatactttagatttcaattttgtggcttttgtctattattctgtactctgccatcagcatatggaaagcttcatttactcatcatgacttgtgccatataaaaattgatatttcggaatagtctaaaggactttttgtacttgaatttaatcatgttgtttctaatattcttaaaagcttgaagactaaagcatatcctttcaacaaagcatagtaaggtaataagaaagtgtagtttgtacaagtgttaaaaaaataaagtagacaatgttacagtgggacttattatttcaagtttacattttctccatgtaattttttaaaaagtaaatgaaaaaatgtgcaataatgtaaaatatgaagtgtatgtgtacacacattttatttttcggtatcttgggtatacgtatggttgaaaactatactggagtctaaaagtattctaatttataagaagacattttggtgatgtttgaaaaatagaaatgtgctagttttgtttttatatcatgtcctttgtacgttgtaatatgagctggcttggttcagtaaatgccatcaccatttccattgagaatttaaaactcaccagtgtttaatatgcaggcttccaaaggcttatgaaaaaaatcaagacccttaaatctagttaatttgctgctaacatgaaactctttggttcttttatttttgccagataattagacacacatctaaagcttagtcttaaatggcttaagtgtagctattgattagtgctgttgctagttcagaaagaaatgtttgtgaatggaaacaagaatattcagtccaaactgttgtaaggacagtacctgaaaaccaggaaacaggataatggaaaaagtcttttaaagatgaaatgttggagccaactttcttatagaattaattgtatgtggctatagaaagcctaatgattgttgcttatttttgagagcatattattcttttatgaccataatcttgctgtttttccatcttccaaaagatcttccttctaatatgtatatcagaatgtgggtagccagtcagacaaattcatattggttggtagctttaaaaagtttgtaatgtgaagacaggaaaggacaaaatagtttgctttggtggtagtactctggttgttaagctaggtattttgagactacttccccatcacaacaacaataaaataatcactcataatcctatcacctggagacatagccatcgttaatatgttagtgactatacaatcatgttttcttctgtatatccatg

SEQ ID NO: 921 - DNA, 4048 bp, Homo sapiens
taatgtttagttctagaaattttgtgcaatatgttcataacgatggctgtggttgccacaaagtgcctcgtttacctttaaatactgttaatgtgtcatgcatgcagatggaaggggtggaactgtgcactaaagtgggggctttaactgtagtatttggcagagttgccttctacctgccagttcaaaagttcaacctgttttcatatagaatatatatactaaaaaatttcagtctgttaaacagccttactctgattcagcctcttcagatactcttgtgctgtgcagcagtggctctgtgtgtaaatgctatgcactgaggatacacaaaaataccaatatgatgtgtacaggataatgcctcatcccaatcagatgtccatttgttattgtgtttgttaacaaccctttatctcttagtgttataaactccacttaaaactgattaaagtctcattcttgtcattgtgtgggtgttttattaaatgagagtttataattcaaattgcttaagtccattgaagttttaattaatgggcagccaaatgtgaatacaaagttttcagtttttttttttcctgctgtccttcaaagcctactgtttaaaaaaaaaaaaaaaaaaaaacatggcctgagagtagagtatctgtctactcatgtttaattaaggaaaaacacttatttttagggctttagtcatcacttcataaattgtataagcacattaaatagcgttctagtcctgaaaaagtccaagattcttagaaaattgtgcatatttttattatgacagatgtttgaagataattccccagaatggatttgatactttagatttcaattttgtggcttttgtctattattctgtactctgccatcagcatatggaaagcttcatttactcatcatgacttgtgccatataaaaattgatatttcggaatagtctaaaggactttttgtacttgaatttaatcatgttgtttctaatattcttaaaagcttgaagactaaagcatatcctttcaacaaagcatagtaaggtaataagaaagtgtagtttgtacaagtgttaaaaaaataaagtagacaatgttacagtgggacttattatttcaagtttacattttctccatgtaattttttaaaaagtaaatgaaaaaatgtgcaataatgtaaaatatgaagtgtatgtgtacacacattttatttttcggtatcttgggtatacgtatggttgaaaactatactggagtctaaaagtattctaatttataagaagacattttggtgatgtttgaaaaatagaaatgtgctagttttgtttttatatcatgtcctttgtacgttgtaatatgagctggcttggttcagtaaatgccatcaccatttccattgagaatttaaaactcaccagtgtttaatatgcaggcttccaaaggcttatgaaaaaaatcaagacccttaaatctagttaatttgctgctaacatgaaactctttggttcttttatttttgccagataattagacacacatctaaagcttagtcttaaatggcttaagtgtagctattgattagtgctgttgctagttcagaaagaaatgtttgtgaatggaaacaagaatattcagtccaaactgttgtaaggacagtacctgaaaaccaggaaacaggataatggaaaaagtcttttaaagatgaaatgttggagccaactttcttatagaattaattgtatgtggctatagaaagcctaatgattgttgcttatttttgagagcatattattcttttatgaccataatcttgctgtttttccatcttccaaaagatcttccttctaatatgtatatcagaatgtgggtagccagtcagacaaattcatattggttggtagctttaaaaagtttgtaatgtgaagacaggaaaggacaaaatagtttgctttggtggtagtactctggttgttaagctaggtattttgagactacttccccatcacaacaacaataaaataatcactcataatcctatcacctggagacatagccatcgttaatatgttagtgactatacaatcatgttttcttctgtatatccatgtatattctttaaaaatgaaatttatactgtacctgatctcaaagctttttagcttagtatatctgtcatgaatttgtaggatgttccattgcatcagaaaacggacagtgatttgattactttctaatgccacagatgcagattacatgtagttattgagaatcctttcgaattcagtggcttaatcatgaatgtctaaatattgttgacattaggatgatacatgtaaattaaagttacatttgtttagcatagacaagcttaacattgtagatgtttctcttcaaaaatcatcttaaacatttgcatttggaattgtgttaaatagaatgtgtgaaacactgtattagtaaacttcatcacctttctacttccttatagtttgaacttttcagtttttgtagttcccaaacagttgctcaatttagagcaaattaatttaacacctgccaaaaaaaggctgctgttggcttatcagttgtctttaaattcaaatgctcatgtgacttttatcacatcaaaaaatatttcattaatgattcacctttagctctgaaaattaccgcgtttagtaattatagtgggcttataaaaacatgcaactctttttgatagttatttgagaattttggtgaaaaatatttagctgagggcagtatagaacttataaaccaatatattgatatttttaaaacatttttacatataagtaaactgccatctttgagcataactacatttaaaaataaagctgcatatttttaaatcaagtgtttaacaagaatttatattttttattttttaaaattaaaaataatttatatttcctctgttgcatgaggattctcatctgtgcttataatggttagagattttatttgtgtggaatgaagtgaggcttgtagtcatggttctagtgtttcagtttgccaagtctgtttactgcagtgaaattcatcaaatgtttcagtgtggttttctgtagcctatcatttactggctatttttttatgtacacctttaggattttctgcctactctatccagttgtccaaatgatatcctacattttacaaatgccctttcagtttctattttctttttccattaaattgccctcatgtcctaatgtgcagtttgtaagtgtgtgtgtgtgtgtctgtgtgtgtgtgaatttgattttcaagagtgctagacttccaatttgagagattaaataatttaattcaggcaaacatttttcattggaatttcacagttcattgtaatgaaaatgttaatcctggatgacctttgacatacagtaatgaatcttggatattaatgaatttgttagtagcatcttgatgtgtgttttaatgagttattttcaaagttgtgcattaaaccaaagttggcatactggaagtgtttatatcaagttccatttggctactgatggacaaaaaatagaaatgccttcctatggagagtatttttcctttaaaaaattaaaaaggttaattattttgactattcggttttaaactttttattcaacaaataccaagtccctgctgtatatatgggtttggaatacattagtgatcaaaacacaccctctatccctgcccttgaagagtttacactccagtagaggaaacagaatttacattaacaattataaattgtgatacatgctgtggaaagtgaggtgcatgtgataatggttatcaaacattatgctccccaaaatttccatcaccttgcagttgaatgaggcctatgtaactagtttattctaatgtaatacagaaagtagtgtgacactccactttctgtaaaggcaatgaaaaaaatttaccatccagtttctctcttcccctactgctgtgattaaggattttgcatgttctagatggtgcagctttgtcagcctgggtcttgagtgatactggagc

SEQ ID NO: 922 - DNA, 4115 bp, Homo sapiens
atatagaatatatatactaaaaaatttcagtctgttaaacagccttactctgattcagcctcttcagatactcttgtgctgtgcagcagtggctctgtgtgtaaatgctatgcactgaggatacacaaaaataccaatatgatgtgtacaggataatgcctcatcccaatcagatgtccatttgttattgtgtttgttaacaaccctttatctcttagtgttataaactccacttaaaactgattaaagtctcattcttgtcattgtgtgggtgttttattaaatgagagtttataattcaaattgcttaagtccattgaagttttaattaatgggcagccaaatgtgaatacaaagttttcagtttttttttttcctgctgtccttcaaagcctactgtttaaaaaaaaaaaaaaaaaaaaacatggcctgagagtagagtatctgtctactcatgtttaattaaggaaaaacacttatttttagggctttagtcatcacttcataaattgtataagcacattaaatagcgttctagtcctgaaaaagtccaagattcttagaaaattgtgcatatttttattatgacagatgtttgaagataattccccagaatggatttgatactttagatttcaattttgtggcttttgtctattattctgtactctgccatcagcatatggaaagcttcatttactcatcatgacttgtgccatataaaaattgatatttcggaatagtctaaaggactttttgtacttgaatttaatcatgttgtttctaatattcttaaaagcttgaagactaaagcatatcctttcaacaaagcatagtaaggtaataagaaagtgtagtttgtacaagtgttaaaaaaataaagtagacaatgttacagtgggacttattatttcaagtttacattttctccatgtaattttttaaaaagtaaatgaaaaaatgtgcaataatgtaaaatatgaagtgtatgtgtacacacattttatttttcggtatcttgggtatacgtatggttgaaaactatactggagtctaaaagtattctaatttataagaagacattttggtgatgtttgaaaaatagaaatgtgctagttttgtttttatatcatgtcctttgtacgttgtaatatgagctggcttggttcagtaaatgccatcaccatttccattgagaatttaaaactcaccagtgtttaatatgcaggcttccaaaggcttatgaaaaaaatcaagacccttaaatctagttaatttgctgctaacatgaaactctttggttcttttatttttgccagataattagacacacatctaaagcttagtcttaaatggcttaagtgtagctattgattagtgctgttgctagttcagaaagaaatgtttgtgaatggaaacaagaatattcagtccaaactgttgtaaggacagtacctgaaaaccaggaaacaggataatggaaaaagtcttttaaagatgaaatgttggagccaactttcttatagaattaattgtatgtggctatagaaagcctaatgattgttgcttatttttgagagcatattattcttttatgaccataatcttgctgtttttccatcttccaaaagatcttccttctaatatgtatatcagaatgtgggtagccagtcagacaaattcatattggttggtagctttaaaaagtttgtaatgtgaagacaggaaaggacaaaatagtttgctttggtggtagtactctggttgttaagctaggtattttgagactacttccccatcacaacaacaataaaataatcactcataatcctatcacctggagacatagccatcgttaatatgttagtgactatacaatcatgttttcttctgtatatccatgtatattctttaaaaatgaaatttatactgtacctgatctcaaagctttttagcttagtatatctgtcatgaatttgtaggatgttccattgcatcagaaaacggacagtgatttgattactttctaatgccacagatgcagattacatgtagttattgagaatcctttcgaattcagtggcttaatcatgaatgtctaaatattgttgacattaggatgatacatgtaaattaaagttacatttgtttagcatagacaagcttaacattgtagatgtttctcttcaaaaatcatcttaaacatttgcatttggaattgtgttaaatagaatgtgtgaaacactgtattagtaaacttcatcacctttctacttccttatagtttgaacttttcagtttttgtagttcccaaacagttgctcaatttagagcaaattaatttaacacctgccaaaaaaaggctgctgttggcttatcagttgtctttaaattcaaatgctcatgtgacttttatcacatcaaaaaatatttcattaatgattcacctttagctctgaaaattaccgcgtttagtaattatagtgggcttataaaaacatgcaactctttttgatagttatttgagaattttggtgaaaaatatttagctgagggcagtatagaacttataaaccaatatattgatatttttaaaacatttttacatataagtaaactgccatctttgagcataactacatttaaaaataaagctgcatatttttaaatcaagtgtttaacaagaatttatattttttattttttaaaattaaaaataatttatatttcctctgttgcatgaggattctcatctgtgcttataatggttagagattttatttgtgtggaatgaagtgaggcttgtagtcatggttctagtgtttcagtttgccaagtctgtttactgcagtgaaattcatcaaatgtttcagtgtggttttctgtagcctatcatttactggctatttttttatgtacacctttaggattttctgcctactctatccagttgtccaaatgatatcctacattttacaaatgccctttcagtttctattttctttttccattaaattgccctcatgtcctaatgtgcagtttgtaagtgtgtgtgtgtgtgtctgtgtgtgtgtgaatttgattttcaagagtgctagacttccaatttgagagattaaataatttaattcaggcaaacatttttcattggaatttcacagttcattgtaatgaaaatgttaatcctggatgacctttgacatacagtaatgaatcttggatattaatgaatttgttagtagcatcttgatgtgtgttttaatgagttattttcaaagttgtgcattaaaccaaagttggcatactggaagtgtttatatcaagttccatttggctactgatggacaaaaaatagaaatgccttcctatggagagtatttttcctttaaaaaattaaaaaggttaattattttgactattcggttttaaactttttattcaacaaataccaagtccctgctgtatatatgggtttggaatacattagtgatcaaaacacaccctctatccctgcccttgaagagtttacactccagtagaggaaacagaatttacattaacaattataaattgtgatacatgctgtggaaagtgaggtgcatgtgataatggttatcaaacattatgctccccaaaatttccatcaccttgcagttgaatgaggcctatgtaactagtttattctaatgtaatacagaaagtagtgtgacactccactttctgtaaaggcaatgaaaaaaatttaccatccagtttctctcttcccctactgctgtgattaaggattttgcatgttctagatggtgcagctttgtcagcctgggtcttgagtgatactggagcagaactccctcaaattgttccttctgccacgctaaacttgttagatattagcataaataagaaataaaccatttagactgatactttgggacaattttttatcacagtgtaagttatatcctgactaaaacagtgctttggaaagatcagggaagggtttcttgagctacaaaagggagttaagaatgaagcaaaatgaaatatggcatctttaaatgacatgatgcaataaactctaaattgcaagttattcaatagttactgagcaccag

SEQ ID NO: 923 - DNA, 46 bp, Homo sapiens
cgaggaagaggctgcacggttagaaaagacgaagaggaggcgagaa

SEQ ID NO: 924 - DNA, 50 bp, Homo sapiens
gctgcctccgccggcggcctccggagcccgggccacggggggtgcggcgg

SEQ ID NO: 925 - DNA, 42 bp, Homo sapiens
atggctgctgcggcggctgctggatggttgcagcgactgggc

SEQ ID NO: 926 - DNA, 45 bp, Homo sapiens
ctctttgatgatggctgtcatgtctgggagcctgtggctgaagaa

SEQ ID NO: 927 - DNA, 45 bp, Homo sapiens
aatctatcaatgcaactcaggaaactaaaacaatcactgcaagat

SEQ ID NO: 928 - DNA, 40 bp, Homo sapiens
tatccattctatgtttatgacaagagcactgaacattaaa

SEQ ID NO: 929 - DNA, 66 bp, Homo sapiens
atgccttgaagatgtcctaataccttgaagatgttcacacatgtcccaatgtcaactgttgcaaat

SEQ ID NO: 930 - DNA, 34 bp, Homo sapiens
caaatccactaaggaattaagactaatgaaagaa

SEQ ID NO: 931 - DNA, 42 bp, Homo sapiens
ttttgtctctggtccttacttccccatagaaatctagggcct

SEQ ID NO: 932 - DNA, 58 bp, Homo sapiens
agttctttgctatatataagttccctgctttcagaagacaaattctacagcctgatac

SEQ ID NO: 933 - DNA, 111 bp, Homo sapiens
atctgatattggggcactggtaaagacagaagctctccatgtcatggtcacccactgctctcttcatcagtatgcgctagggtgcaagactgtcatcaatcctgaaagaaa

SEQ ID NO: 934 - DNA, 22 bp, Homo sapiens
gtaggcagacagtacaccttac

SEQ ID NO: 935 - DNA, 57 bp, Homo sapiens
ttgatcatctataagaaacattcctggaagaaaaaaaaaaaaaaacctaccactgac

SEQ ID NO: 936 - DNA, 45 bp, Homo sapiens
gttttaaaacaattacatttcaagtattttacagaagcctgcagt

SEQ ID NO: 937 - DNA, 40 bp, Homo sapiens
aaaaattaagagagagtaaaaaagagaaagaaacgagtgt

SEQ ID NO: 938 - DNA, 4046 bp, Homo sapiens
tgtcaatactttccccattctgcaaaaagagggccccatccccatccctaatcaaaaccaatgtgttgtacctgaaactgcaaagattaatgcttttcgatgaccactaacttttgaagcccgaaggcctaacttttagacaactaaagctacacactgttaaaattcttgggcttctgtcttattcagcaagctgactcagtaaatttaatacactgtatgaaaaaagctaacatacctacaatctaaagctggagtaaacccctcttgccagcatttctagatattagctggtaaaatacaactgacattctacacaaatcagtaaaattaacgataccaaaaggtgtcagaggacctgaaacctaaaaacggtgagcagcaattctggcatcacaacaatacttaaatttcaagcatgaactgaagttttatttctgcaatcttcacttgctacacacaatacccttgaacctacacattaccatctgggatcagaaactactcaatatccattctatgtttatgacaagagcactgaacattaaatgctactgaagtgcaaatttcaagcactatcctacatcaccccatagggagagaaaaaggtaaatataacaaagatctagtaagaacgccttataaggtatattatggcactattgacttcaaactacaaaacttctacatacagttcaaagttgtaggtaacttaagtttaaacattaacaaaactactttttgccctcaatgtgcaccatatatactgaaaatgattctgcttctaaagttatgcaaatcagtcatattttaaaagaatctatcaatgcaactcaggaaactaaaacaatcactgcaagattctgatgcaatatgcgtacgtgcaacactaattttcattttattctgatctaaacccttgatctagggcctaagccaagatttaatcgaaatatgctcaacctcaaaaagcgtctacttttttgttcatttaggagaccggattaccgagctcgctaatccactaacagtgtactgtattctgtattaacggacaatagccctcaggaagagaccatatagatagcctaagaaagcaatcggtggcttgacacttgcaaccaggcaagagttccgtctagccaaacacaccctaggttgaatacacagaaaggaaacacaaaatatatgacctagcaacctgaccagggttaaatgttatagtcacccaaactacggacattttcgcatccgtctactcccacgttctaagagagtgacagaaaggtaaagaggagcagccgcagaaatggatacaggtcaagtctaagtcgaatccatcctcttgatatctccttttgtttctgctaacgatctctttgatgatggctgtcatgtctgggagcctgtggctgaagaaaaaggaggagagagatggcagaagctgctggtggcggggcttcttctgcaggatggaaatggctctggacttggcggtagctgatgcccctcgctctgccgccgcttggctctggaccgcagccgggtaatggctgctgcggcggctgctggatggttgcagcgactgggcctgcttctcctcagcagccagaggcctggcagcggcggcagcggaatggggagaagacgaataatcctccgaacggctgcctccgccggcggcctccggagcccgggccacggggggtgcggcggcggcgcacgggaggtttaaaaccggcccgggtccctggatgtgccagccgccgccgccgccgtgttggaggcagtagaaggggagagaccaactctccggcgttcccagccctggaaatggtgacaggcgactcagaccccctccctggagctgcagccgccgcggccgccgccgccgccgcttctcccccccgctccaggagcgggaggtgccgccgccgccgccgcgcctcagccggctcccgcccgagcccacggcttccaccttccctttcaggagaagccgaggaagaggctgcacggttagaaaagacgaagaggaggcgagaaacgccgccgctgccgccgccgcaggccggccggctccccgagggcgctgcccccgcggctgctcacaggcgctgagaggggctccgggccgcggccgccgccgtctctcatctccctcgcctgagcccggcctcgcctcacagcggctcaactctcaaacttccatcatggctgcagcttccgagaggagagaactgagcgcagtcgcgtcccagcgccgagcgcgtatcctgccgcagcgcataaagagtcccgccacatcaccgcccgccggcctgcccgccccctccgccgccgcgccgggagcccgggcgcctcggaagaccgaggggaggcgggaggcgagcgagaggcggacgggaccgcgccgggcgaggggagggcagggcagggcagggggcggtaggagggggcagagcggtagctctgggtgcgagcgcagagtccccaagccgcaggctctactgagcatgcccagtgtagctgcctggggcttgctcgggccggttcccagccgccagcctgcagctgcacttgctgcggcttttgcagcaacgcgaggcgaggataacgagctaagcctcggcctctgcccagaaacccagccggaggcagggtaggctgttgtggggcgggggtggaggactgatgatgaaagctgagatgggtgcgttgagcagtgtcactgactcgagtctgaggttacctgtgcacaggtgaaaaggaccaggtgaccacgctgctcagtgtagagggaaatgcagggacggtccctgcaaggggaataccctccccccttgcctctacccctagatttccgcggcgtggactgcattcgctctttccttttgcaccgctgtcggatcacaatcgttcgcagagatttgactgtaacagcctttgcctagagattcccccttcccccaaatctgtgtcctcatggtgtcagtcttagcacaaagagcaacctgctattgtgtcgccagcgtgtatcacctcatccggctcccttgcagcgccccacctctcgcttccccggtaactcggctcgtttgccctaaaaatgaaagctctcagccgagcgtgctgaacgtgaacacatagccgttgaatttcaagggcccaaagggcacctatctaaatgaactgaaagaggatccctgtgagtgggacgcaccccgcaggcctctcctgcgcccgctccggtgcccccaagagagtcgagcatctttcccctcgggctccaggtcggttcgcggcgtcggagtcaagctcggttctcagagaccacctagccccgcccccccttggccgccgtgaaaacccggcaggatggatcgcccggggccaggctccgcgcgccccggccggaccgtgcacgtttggggttaccgggttgagtggaaagtacggaacggtaggaagctgcagcccagcgagtgggcggggcgaggagacctaggagggttcaaaaggaggtggaaggatacacgggccacagtcggaactactttccgaaggaggtcacgtgtgtccctagttggggaactttccaaattcccactccccagtgatagctccggaggcaagtcgtcttcttcctttgctcggggtgctcttgcctggtgcaggcagcggaaccccaacccttcctgcgccgcggcggaaacaggggctcggaccagcctcccgaaggagcgctgtcggggctggcgcttggggaactggttacacaagcacccacatccaaacacgtgcccccgcctccccgcctgctggctgccgccgattcttacagaacgcggggagagagtccccaaactggtgccactcctcgcctgctaccctaagagcaagccaaaggactgagacctgagactcactccttgctctacatcgacctattctgcgccttcccaaacgtgggaaaaggagctgggcgctagggctctcgggcctctccatcgctgatgccctgccgcttagggtgaacccttttg

SEQ ID NO: 939 - DNA, 4050 bp, Homo sapiens
aataaaacctctcccgatataaacgctgtcttaaaaaaaaatattccccacaatttttagcaggacatatagacactgtagtgtcactctacctttagacaaaatgcaactgacatttgctaagaaataacttttattaaaaatactgtgctagtacttatgcaattacataattttaactaaatattgtccactgccacaattcgcattaccaaactcatattaccaaattttaggccttgatagagcctaaatgcttcagtcacttcagaccaataacttaattctgttttcacataccttatacactggcctaccaatagctctcaattcctgtcaatactttccccattctgcaaaaagagggccccatccccatccctaatcaaaaccaatgtgttgtacctgaaactgcaaagattaatgcttttcgatgaccactaacttttgaagcccgaaggcctaacttttagacaactaaagctacacactgttaaaattcttgggcttctgtcttattcagcaagctgactcagtaaatttaatacactgtatgaaaaaagctaacatacctacaatctaaagctggagtaaacccctcttgccagcatttctagatattagctggtaaaatacaactgacattctacacaaatcagtaaaattaacgataccaaaaggtgtcagaggacctgaaacctaaaaacggtgagcagcaattctggcatcacaacaatacttaaatttcaagcatgaactgaagttttatttctgcaatcttcacttgctacacacaatacccttgaacctacacattaccatctgggatcagaaactactcaatatccattctatgtttatgacaagagcactgaacattaaatgctactgaagtgcaaatttcaagcactatcctacatcaccccatagggagagaaaaaggtaaatataacaaagatctagtaagaacgccttataaggtatattatggcactattgacttcaaactacaaaacttctacatacagttcaaagttgtaggtaacttaagtttaaacattaacaaaactactttttgccctcaatgtgcaccatatatactgaaaatgattctgcttctaaagttatgcaaatcagtcatattttaaaagaatctatcaatgcaactcaggaaactaaaacaatcactgcaagattctgatgcaatatgcgtacgtgcaacactaattttcattttattctgatctaaacccttgatctagggcctaagccaagatttaatcgaaatatgctcaacctcaaaaagcgtctacttttttgttcatttaggagaccggattaccgagctcgctaatccactaacagtgtactgtattctgtattaacggacaatagccctcaggaagagaccatatagatagcctaagaaagcaatcggtggcttgacacttgcaaccaggcaagagttccgtctagccaaacacaccctaggttgaatacacagaaaggaaacacaaaatatatgacctagcaacctgaccagggttaaatgttatagtcacccaaactacggacattttcgcatccgtctactcccacgttctaagagagtgacagaaaggtaaagaggagcagccgcagaaatggatacaggtcaagtctaagtcgaatccatcctcttgatatctccttttgtttctgctaacgatctctttgatgatggctgtcatgtctgggagcctgtggctgaagaaaaaggaggagagagatggcagaagctgctggtggcggggcttcttctgcaggatggaaatggctctggacttggcggtagctgatgcccctcgctctgccgccgcttggctctggaccgcagccgggtaatggctgctgcggcggctgctggatggttgcagcgactgggcctgcttctcctcagcagccagaggcctggcagcggcggcagcggaatggggagaagacgaataatcctccgaacggctgcctccgccggcggcctccggagcccgggccacggggggtgcggcggcggcgcacgggaggtttaaaaccggcccgggtccctggatgtgccagccgccgccgccgccgtgttggaggcagtagaaggggagagaccaactctccggcgttcccagccctggaaatggtgacaggcgactcagaccccctccctggagctgcagccgccgcggccgccgccgccgccgcttctcccccccgctccaggagcgggaggtgccgccgccgccgccgcgcctcagccggctcccgcccgagcccacggcttccaccttccctttcaggagaagccgaggaagaggctgcacggttagaaaagacgaagaggaggcgagaaacgccgccgctgccgccgccgcaggccggccggctccccgagggcgctgcccccgcggctgctcacaggcgctgagaggggctccgggccgcggccgccgccgtctctcatctccctcgcctgagcccggcctcgcctcacagcggctcaactctcaaacttccatcatggctgcagcttccgagaggagagaactgagcgcagtcgcgtcccagcgccgagcgcgtatcctgccgcagcgcataaagagtcccgccacatcaccgcccgccggcctgcccgccccctccgccgccgcgccgggagcccgggcgcctcggaagaccgaggggaggcgggaggcgagcgagaggcggacgggaccgcgccgggcgaggggagggcagggcagggcagggggcggtaggagggggcagagcggtagctctgggtgcgagcgcagagtccccaagccgcaggctctactgagcatgcccagtgtagctgcctggggcttgctcgggccggttcccagccgccagcctgcagctgcacttgctgcggcttttgcagcaacgcgaggcgaggataacgagctaagcctcggcctctgcccagaaacccagccggaggcagggtaggctgttgtggggcgggggtggaggactgatgatgaaagctgagatgggtgcgttgagcagtgtcactgactcgagtctgaggttacctgtgcacaggtgaaaaggaccaggtgaccacgctgctcagtgtagagggaaatgcagggacggtccctgcaaggggaataccctccccccttgcctctacccctagatttccgcggcgtggactgcattcgctctttccttttgcaccgctgtcggatcacaatcgttcgcagagatttgactgtaacagcctttgcctagagattcccccttcccccaaatctgtgtcctcatggtgtcagtcttagcacaaagagcaacctgctattgtgtcgccagcgtgtatcacctcatccggctcccttgcagcgccccacctctcgcttccccggtaactcggctcgtttgccctaaaaatgaaagctctcagccgagcgtgctgaacgtgaacacatagccgttgaatttcaagggcccaaagggcacctatctaaatgaactgaaagaggatccctgtgagtgggacgcaccccgcaggcctctcctgcgcccgctccggtgcccccaagagagtcgagcatctttcccctcgggctccaggtcggttcgcggcgtcggagtcaagctcggttctcagagaccacctagccccgcccccccttggccgccgtgaaaacccggcaggatggatcgcccggggccaggctccgcgcgccccggccggaccgtgcacgtttggggttaccgggttgagtggaaagtacggaacggtaggaagctgcagcccagcgagtgggcggggcgaggagacctaggagggttcaaaaggaggtggaaggatacacgggccacagtcggaactactttccgaaggaggtcacgtgtgtccctagttggggaactttccaaattcccactccccagtgatagctccggaggcaagtcgtcttcttcctttgctcggggtgctcttgcctggtgcaggcagcggaaccccaacccttcctgcgccgcggcggaaac

SEQ ID NO: 940 - DNA, 4042 bp, Homo sapiens
aacagaaaactaaattttgggaagctacttcttcagtaagttttacattcatttcaaaacaaaaacttgggcaaaattaactgtgcacatttatatgcagctaacataatccaacggaataaaacctctcccgatataaacgctgtcttaaaaaaaaatattccccacaatttttagcaggacatatagacactgtagtgtcactctacctttagacaaaatgcaactgacatttgctaagaaataacttttattaaaaatactgtgctagtacttatgcaattacataattttaactaaatattgtccactgccacaattcgcattaccaaactcatattaccaaattttaggccttgatagagcctaaatgcttcagtcacttcagaccaataacttaattctgttttcacataccttatacactggcctaccaatagctctcaattcctgtcaatactttccccattctgcaaaaagagggccccatccccatccctaatcaaaaccaatgtgttgtacctgaaactgcaaagattaatgcttttcgatgaccactaacttttgaagcccgaaggcctaacttttagacaactaaagctacacactgttaaaattcttgggcttctgtcttattcagcaagctgactcagtaaatttaatacactgtatgaaaaaagctaacatacctacaatctaaagctggagtaaacccctcttgccagcatttctagatattagctggtaaaatacaactgacattctacacaaatcagtaaaattaacgataccaaaaggtgtcagaggacctgaaacctaaaaacggtgagcagcaattctggcatcacaacaatacttaaatttcaagcatgaactgaagttttatttctgcaatcttcacttgctacacacaatacccttgaacctacacattaccatctgggatcagaaactactcaatatccattctatgtttatgacaagagcactgaacattaaatgctactgaagtgcaaatttcaagcactatcctacatcaccccatagggagagaaaaaggtaaatataacaaagatctagtaagaacgccttataaggtatattatggcactattgacttcaaactacaaaacttctacatacagttcaaagttgtaggtaacttaagtttaaacattaacaaaactactttttgccctcaatgtgcaccatatatactgaaaatgattctgcttctaaagttatgcaaatcagtcatattttaaaagaatctatcaatgcaactcaggaaactaaaacaatcactgcaagattctgatgcaatatgcgtacgtgcaacactaattttcattttattctgatctaaacccttgatctagggcctaagccaagatttaatcgaaatatgctcaacctcaaaaagcgtctacttttttgttcatttaggagaccggattaccgagctcgctaatccactaacagtgtactgtattctgtattaacggacaatagccctcaggaagagaccatatagatagcctaagaaagcaatcggtggcttgacacttgcaaccaggcaagagttccgtctagccaaacacaccctaggttgaatacacagaaaggaaacacaaaatatatgacctagcaacctgaccagggttaaatgttatagtcacccaaactacggacattttcgcatccgtctactcccacgttctaagagagtgacagaaaggtaaagaggagcagccgcagaaatggatacaggtcaagtctaagtcgaatccatcctcttgatatctccttttgtttctgctaacgatctctttgatgatggctgtcatgtctgggagcctgtggctgaagaaaaaggaggagagagatggcagaagctgctggtggcggggcttcttctgcaggatggaaatggctctggacttggcggtagctgatgcccctcgctctgccgccgcttggctctggaccgcagccgggtaatggctgctgcggcggctgctggatggttgcagcgactgggcctgcttctcctcagcagccagaggcctggcagcggcggcagcggaatggggagaagacgaataatcctccgaacggctgcctccgccggcggcctccggagcccgggccacggggggtgcggcggcggcgcacgggaggtttaaaaccggcccgggtccctggatgtgccagccgccgccgccgccgtgttggaggcagtagaaggggagagaccaactctccggcgttcccagccctggaaatggtgacaggcgactcagaccccctccctggagctgcagccgccgcggccgccgccgccgccgcttctcccccccgctccaggagcgggaggtgccgccgccgccgccgcgcctcagccggctcccgcccgagcccacggcttccaccttccctttcaggagaagccgaggaagaggctgcacggttagaaaagacgaagaggaggcgagaaacgccgccgctgccgccgccgcaggccggccggctccccgagggcgctgcccccgcggctgctcacaggcgctgagaggggctccgggccgcggccgccgccgtctctcatctccctcgcctgagcccggcctcgcctcacagcggctcaactctcaaacttccatcatggctgcagcttccgagaggagagaactgagcgcagtcgcgtcccagcgccgagcgcgtatcctgccgcagcgcataaagagtcccgccacatcaccgcccgccggcctgcccgccccctccgccgccgcgccgggagcccgggcgcctcggaagaccgaggggaggcgggaggcgagcgagaggcggacgggaccgcgccgggcgaggggagggcagggcagggcagggggcggtaggagggggcagagcggtagctctgggtgcgagcgcagagtccccaagccgcaggctctactgagcatgcccagtgtagctgcctggggcttgctcgggccggttcccagccgccagcctgcagctgcacttgctgcggcttttgcagcaacgcgaggcgaggataacgagctaagcctcggcctctgcccagaaacccagccggaggcagggtaggctgttgtggggcgggggtggaggactgatgatgaaagctgagatgggtgcgttgagcagtgtcactgactcgagtctgaggttacctgtgcacaggtgaaaaggaccaggtgaccacgctgctcagtgtagagggaaatgcagggacggtccctgcaaggggaataccctccccccttgcctctacccctagatttccgcggcgtggactgcattcgctctttccttttgcaccgctgtcggatcacaatcgttcgcagagatttgactgtaacagcctttgcctagagattcccccttcccccaaatctgtgtcctcatggtgtcagtcttagcacaaagagcaacctgctattgtgtcgccagcgtgtatcacctcatccggctcccttgcagcgccccacctctcgcttccccggtaactcggctcgtttgccctaaaaatgaaagctctcagccgagcgtgctgaacgtgaacacatagccgttgaatttcaagggcccaaagggcacctatctaaatgaactgaaagaggatccctgtgagtgggacgcaccccgcaggcctctcctgcgcccgctccggtgcccccaagagagtcgagcatctttcccctcgggctccaggtcggttcgcggcgtcggagtcaagctcggttctcagagaccacctagccccgcccccccttggccgccgtgaaaacccggcaggatggatcgcccggggccaggctccgcgcgccccggccggaccgtgcacgtttggggttaccgggttgagtggaaagtacggaacggtaggaagctgcagcccagcgagtgggcggggcgaggagacctaggagggttcaaaaggaggtggaaggatacacgggccacagtcggaactactttccgaaggaggtcacgtgtgtccctagttggg

SEQ ID NO: 941 - DNA, 4045 bp, Homo sapiens
tatttggatgactgtcagtaattcatgctaatagtagactgctttggaagtcacaaaagaatttttccataattatcttctgggcaagcgggtccagtttagccttagtaacattctcaattaatgtcaacttcaaaatttgcaaatactcttttaaaataatatttttggcttaacagaaaactaaattttgggaagctacttcttcagtaagttttacattcatttcaaaacaaaaacttgggcaaaattaactgtgcacatttatatgcagctaacataatccaacggaataaaacctctcccgatataaacgctgtcttaaaaaaaaatattccccacaatttttagcaggacatatagacactgtagtgtcactctacctttagacaaaatgcaactgacatttgctaagaaataacttttattaaaaatactgtgctagtacttatgcaattacataattttaactaaatattgtccactgccacaattcgcattaccaaactcatattaccaaattttaggccttgatagagcctaaatgcttcagtcacttcagaccaataacttaattctgttttcacataccttatacactggcctaccaatagctctcaattcctgtcaatactttccccattctgcaaaaagagggccccatccccatccctaatcaaaaccaatgtgttgtacctgaaactgcaaagattaatgcttttcgatgaccactaacttttgaagcccgaaggcctaacttttagacaactaaagctacacactgttaaaattcttgggcttctgtcttattcagcaagctgactcagtaaatttaatacactgtatgaaaaaagctaacatacctacaatctaaagctggagtaaacccctcttgccagcatttctagatattagctggtaaaatacaactgacattctacacaaatcagtaaaattaacgataccaaaaggtgtcagaggacctgaaacctaaaaacggtgagcagcaattctggcatcacaacaatacttaaatttcaagcatgaactgaagttttatttctgcaatcttcacttgctacacacaatacccttgaacctacacattaccatctgggatcagaaactactcaatatccattctatgtttatgacaagagcactgaacattaaatgctactgaagtgcaaatttcaagcactatcctacatcaccccatagggagagaaaaaggtaaatataacaaagatctagtaagaacgccttataaggtatattatggcactattgacttcaaactacaaaacttctacatacagttcaaagttgtaggtaacttaagtttaaacattaacaaaactactttttgccctcaatgtgcaccatatatactgaaaatgattctgcttctaaagttatgcaaatcagtcatattttaaaagaatctatcaatgcaactcaggaaactaaaacaatcactgcaagattctgatgcaatatgcgtacgtgcaacactaattttcattttattctgatctaaacccttgatctagggcctaagccaagatttaatcgaaatatgctcaacctcaaaaagcgtctacttttttgttcatttaggagaccggattaccgagctcgctaatccactaacagtgtactgtattctgtattaacggacaatagccctcaggaagagaccatatagatagcctaagaaagcaatcggtggcttgacacttgcaaccaggcaagagttccgtctagccaaacacaccctaggttgaatacacagaaaggaaacacaaaatatatgacctagcaacctgaccagggttaaatgttatagtcacccaaactacggacattttcgcatccgtctactcccacgttctaagagagtgacagaaaggtaaagaggagcagccgcagaaatggatacaggtcaagtctaagtcgaatccatcctcttgatatctccttttgtttctgctaacgatctctttgatgatggctgtcatgtctgggagcctgtggctgaagaaaaaggaggagagagatggcagaagctgctggtggcggggcttcttctgcaggatggaaatggctctggacttggcggtagctgatgcccctcgctctgccgccgcttggctctggaccgcagccgggtaatggctgctgcggcggctgctggatggttgcagcgactgggcctgcttctcctcagcagccagaggcctggcagcggcggcagcggaatggggagaagacgaataatcctccgaacggctgcctccgccggcggcctccggagcccgggccacggggggtgcggcggcggcgcacgggaggtttaaaaccggcccgggtccctggatgtgccagccgccgccgccgccgtgttggaggcagtagaaggggagagaccaactctccggcgttcccagccctggaaatggtgacaggcgactcagaccccctccctggagctgcagccgccgcggccgccgccgccgccgcttctcccccccgctccaggagcgggaggtgccgccgccgccgccgcgcctcagccggctcccgcccgagcccacggcttccaccttccctttcaggagaagccgaggaagaggctgcacggttagaaaagacgaagaggaggcgagaaacgccgccgctgccgccgccgcaggccggccggctccccgagggcgctgcccccgcggctgctcacaggcgctgagaggggctccgggccgcggccgccgccgtctctcatctccctcgcctgagcccggcctcgcctcacagcggctcaactctcaaacttccatcatggctgcagcttccgagaggagagaactgagcgcagtcgcgtcccagcgccgagcgcgtatcctgccgcagcgcataaagagtcccgccacatcaccgcccgccggcctgcccgccccctccgccgccgcgccgggagcccgggcgcctcggaagaccgaggggaggcgggaggcgagcgagaggcggacgggaccgcgccgggcgaggggagggcagggcagggcagggggcggtaggagggggcagagcggtagctctgggtgcgagcgcagagtccccaagccgcaggctctactgagcatgcccagtgtagctgcctggggcttgctcgggccggttcccagccgccagcctgcagctgcacttgctgcggcttttgcagcaacgcgaggcgaggataacgagctaagcctcggcctctgcccagaaacccagccggaggcagggtaggctgttgtggggcgggggtggaggactgatgatgaaagctgagatgggtgcgttgagcagtgtcactgactcgagtctgaggttacctgtgcacaggtgaaaaggaccaggtgaccacgctgctcagtgtagagggaaatgcagggacggtccctgcaaggggaataccctccccccttgcctctacccctagatttccgcggcgtggactgcattcgctctttccttttgcaccgctgtcggatcacaatcgttcgcagagatttgactgtaacagcctttgcctagagattcccccttcccccaaatctgtgtcctcatggtgtcagtcttagcacaaagagcaacctgctattgtgtcgccagcgtgtatcacctcatccggctcccttgcagcgccccacctctcgcttccccggtaactcggctcgtttgccctaaaaatgaaagctctcagccgagcgtgctgaacgtgaacacatagccgttgaatttcaagggcccaaagggcacctatctaaatgaactgaaagaggatccctgtgagtgggacgcaccccgcaggcctctcctgcgcccgctccggtgcccccaagagagtcgagcatctttcccctcgggctccaggtcggttcgcggcgtcggagtcaagctcggttctcagagaccacctagccccgcccccccttggccgccgtgaaaacccggcaggatggatcgcccggggccaggctccgcgcgccccggccggacc

SEQ ID NO: 942 - DNA, 4045 bp, Homo sapiens
caaagacaaagtcttcaatgacaattttaatgccttcccactccaataaacagaaaacattaacgtgaaaacaagcaaaccaagtacgttggaatatcaaaattattgggagtgcaattatcaaaaaagcaagcacttcactgactttccttactgactttttttcatatcaacttttggctcaataaaaccacaactctagaaattaagtgttattagtcatttgacgcaatatttgatactgctttctatgcatatcataactaaaagtacagttttagagaaagttttaagtcacacaaatttcatgtgtagagaccaacatacgctgaaatcaaagaaaatgccagtcatgtcacagctcacatgtaaaaacctggtaaaataattttaaggtcttaataaccctgataatttaaaatcaagtgggaaaagtaaaagtagtgtgttatgtactttaagtgctgaaagaaatctgtctcccagacagcattcaattattttcttcaaaggcttttttttcaaagttacataaacatttaattttttgttcctatatatttggatgactgtcagtaattcatgctaatagtagactgctttggaagtcacaaaagaatttttccataattatcttctgggcaagcgggtccagtttagccttagtaacattctcaattaatgtcaacttcaaaatttgcaaatactcttttaaaataatatttttggcttaacagaaaactaaattttgggaagctacttcttcagtaagttttacattcatttcaaaacaaaaacttgggcaaaattaactgtgcacatttatatgcagctaacataatccaacggaataaaacctctcccgatataaacgctgtcttaaaaaaaaatattccccacaatttttagcaggacatatagacactgtagtgtcactctacctttagacaaaatgcaactgacatttgctaagaaataacttttattaaaaatactgtgctagtacttatgcaattacataattttaactaaatattgtccactgccacaattcgcattaccaaactcatattaccaaattttaggccttgatagagcctaaatgcttcagtcacttcagaccaataacttaattctgttttcacataccttatacactggcctaccaatagctctcaattcctgtcaatactttccccattctgcaaaaagagggccccatccccatccctaatcaaaaccaatgtgttgtacctgaaactgcaaagattaatgcttttcgatgaccactaacttttgaagcccgaaggcctaacttttagacaactaaagctacacactgttaaaattcttgggcttctgtcttattcagcaagctgactcagtaaatttaatacactgtatgaaaaaagctaacatacctacaatctaaagctggagtaaacccctcttgccagcatttctagatattagctggtaaaatacaactgacattctacacaaatcagtaaaattaacgataccaaaaggtgtcagaggacctgaaacctaaaaacggtgagcagcaattctggcatcacaacaatacttaaatttcaagcatgaactgaagttttatttctgcaatcttcacttgctacacacaatacccttgaacctacacattaccatctgggatcagaaactactcaatatccattctatgtttatgacaagagcactgaacattaaatgctactgaagtgcaaatttcaagcactatcctacatcaccccatagggagagaaaaaggtaaatataacaaagatctagtaagaacgccttataaggtatattatggcactattgacttcaaactacaaaacttctacatacagttcaaagttgtaggtaacttaagtttaaacattaacaaaactactttttgccctcaatgtgcaccatatatactgaaaatgattctgcttctaaagttatgcaaatcagtcatattttaaaagaatctatcaatgcaactcaggaaactaaaacaatcactgcaagattctgatgcaatatgcgtacgtgcaacactaattttcattttattctgatctaaacccttgatctagggcctaagccaagatttaatcgaaatatgctcaacctcaaaaagcgtctacttttttgttcatttaggagaccggattaccgagctcgctaatccactaacagtgtactgtattctgtattaacggacaatagccctcaggaagagaccatatagatagcctaagaaagcaatcggtggcttgacacttgcaaccaggcaagagttccgtctagccaaacacaccctaggttgaatacacagaaaggaaacacaaaatatatgacctagcaacctgaccagggttaaatgttatagtcacccaaactacggacattttcgcatccgtctactcccacgttctaagagagtgacagaaaggtaaagaggagcagccgcagaaatggatacaggtcaagtctaagtcgaatccatcctcttgatatctccttttgtttctgctaacgatctctttgatgatggctgtcatgtctgggagcctgtggctgaagaaaaaggaggagagagatggcagaagctgctggtggcggggcttcttctgcaggatggaaatggctctggacttggcggtagctgatgcccctcgctctgccgccgcttggctctggaccgcagccgggtaatggctgctgcggcggctgctggatggttgcagcgactgggcctgcttctcctcagcagccagaggcctggcagcggcggcagcggaatggggagaagacgaataatcctccgaacggctgcctccgccggcggcctccggagcccgggccacggggggtgcggcggcggcgcacgggaggtttaaaaccggcccgggtccctggatgtgccagccgccgccgccgccgtgttggaggcagtagaaggggagagaccaactctccggcgttcccagccctggaaatggtgacaggcgactcagaccccctccctggagctgcagccgccgcggccgccgccgccgccgcttctcccccccgctccaggagcgggaggtgccgccgccgccgccgcgcctcagccggctcccgcccgagcccacggcttccaccttccctttcaggagaagccgaggaagaggctgcacggttagaaaagacgaagaggaggcgagaaacgccgccgctgccgccgccgcaggccggccggctccccgagggcgctgcccccgcggctgctcacaggcgctgagaggggctccgggccgcggccgccgccgtctctcatctccctcgcctgagcccggcctcgcctcacagcggctcaactctcaaacttccatcatggctgcagcttccgagaggagagaactgagcgcagtcgcgtcccagcgccgagcgcgtatcctgccgcagcgcataaagagtcccgccacatcaccgcccgccggcctgcccgccccctccgccgccgcgccgggagcccgggcgcctcggaagaccgaggggaggcgggaggcgagcgagaggcggacgggaccgcgccgggcgaggggagggcagggcagggcagggggcggtaggagggggcagagcggtagctctgggtgcgagcgcagagtccccaagccgcaggctctactgagcatgcccagtgtagctgcctggggcttgctcgggccggttcccagccgccagcctgcagctgcacttgctgcggcttttgcagcaacgcgaggcgaggataacgagctaagcctcggcctctgcccagaaacccagccggaggcagggtaggctgttgtggggcgggggtggaggactgatgatgaaagctgagatgggtgcgttgagcagtgtcactgactcgagtctgaggttacctgtgcacaggtgaaaaggaccaggtgaccacgctgctcagtgtagagggaaatgcagggacggtccctgcaaggggaataccctccccccttgcctctacccctagatt

SEQ ID NO: 943 - DNA, 4040 bp, Homo sapiens
accaaacaataaaaatacaacagaagcctaacgtttccacataccctaaatacacttaatttttctatagtctcaaattcagcactatatttcagactaatattaagcatataaccctactaacaaatttttagaataatttaattttgcgataatattttaaaactgaattattgtcctcaattttcctcggagaaatggcttcattattaatctttctttatcagataaaaatactccaatcactactttcataaaggaatttaacttttcacaggttagttactgaaataaatactacaacatgtcaaagacaaagtcttcaatgacaattttaatgccttcccactccaataaacagaaaacattaacgtgaaaacaagcaaaccaagtacgttggaatatcaaaattattgggagtgcaattatcaaaaaagcaagcacttcactgactttccttactgactttttttcatatcaacttttggctcaataaaaccacaactctagaaattaagtgttattagtcatttgacgcaatatttgatactgctttctatgcatatcataactaaaagtacagttttagagaaagttttaagtcacacaaatttcatgtgtagagaccaacatacgctgaaatcaaagaaaatgccagtcatgtcacagctcacatgtaaaaacctggtaaaataattttaaggtcttaataaccctgataatttaaaatcaagtgggaaaagtaaaagtagtgtgttatgtactttaagtgctgaaagaaatctgtctcccagacagcattcaattattttcttcaaaggcttttttttcaaagttacataaacatttaattttttgttcctatatatttggatgactgtcagtaattcatgctaatagtagactgctttggaagtcacaaaagaatttttccataattatcttctgggcaagcgggtccagtttagccttagtaacattctcaattaatgtcaacttcaaaatttgcaaatactcttttaaaataatatttttggcttaacagaaaactaaattttgggaagctacttcttcagtaagttttacattcatttcaaaacaaaaacttgggcaaaattaactgtgcacatttatatgcagctaacataatccaacggaataaaacctctcccgatataaacgctgtcttaaaaaaaaatattccccacaatttttagcaggacatatagacactgtagtgtcactctacctttagacaaaatgcaactgacatttgctaagaaataacttttattaaaaatactgtgctagtacttatgcaattacataattttaactaaatattgtccactgccacaattcgcattaccaaactcatattaccaaattttaggccttgatagagcctaaatgcttcagtcacttcagaccaataacttaattctgttttcacataccttatacactggcctaccaatagctctcaattcctgtcaatactttccccattctgcaaaaagagggccccatccccatccctaatcaaaaccaatgtgttgtacctgaaactgcaaagattaatgcttttcgatgaccactaacttttgaagcccgaaggcctaacttttagacaactaaagctacacactgttaaaattcttgggcttctgtcttattcagcaagctgactcagtaaatttaatacactgtatgaaaaaagctaacatacctacaatctaaagctggagtaaacccctcttgccagcatttctagatattagctggtaaaatacaactgacattctacacaaatcagtaaaattaacgataccaaaaggtgtcagaggacctgaaacctaaaaacggtgagcagcaattctggcatcacaacaatacttaaatttcaagcatgaactgaagttttatttctgcaatcttcacttgctacacacaatacccttgaacctacacattaccatctgggatcagaaactactcaatatccattctatgtttatgacaagagcactgaacattaaatgctactgaagtgcaaatttcaagcactatcctacatcaccccatagggagagaaaaaggtaaatataacaaagatctagtaagaacgccttataaggtatattatggcactattgacttcaaactacaaaacttctacatacagttcaaagttgtaggtaacttaagtttaaacattaacaaaactactttttgccctcaatgtgcaccatatatactgaaaatgattctgcttctaaagttatgcaaatcagtcatattttaaaagaatctatcaatgcaactcaggaaactaaaacaatcactgcaagattctgatgcaatatgcgtacgtgcaacactaattttcattttattctgatctaaacccttgatctagggcctaagccaagatttaatcgaaatatgctcaacctcaaaaagcgtctacttttttgttcatttaggagaccggattaccgagctcgctaatccactaacagtgtactgtattctgtattaacggacaatagccctcaggaagagaccatatagatagcctaagaaagcaatcggtggcttgacacttgcaaccaggcaagagttccgtctagccaaacacaccctaggttgaatacacagaaaggaaacacaaaatatatgacctagcaacctgaccagggttaaatgttatagtcacccaaactacggacattttcgcatccgtctactcccacgttctaagagagtgacagaaaggtaaagaggagcagccgcagaaatggatacaggtcaagtctaagtcgaatccatcctcttgatatctccttttgtttctgctaacgatctctttgatgatggctgtcatgtctgggagcctgtggctgaagaaaaaggaggagagagatggcagaagctgctggtggcggggcttcttctgcaggatggaaatggctctggacttggcggtagctgatgcccctcgctctgccgccgcttggctctggaccgcagccgggtaatggctgctgcggcggctgctggatggttgcagcgactgggcctgcttctcctcagcagccagaggcctggcagcggcggcagcggaatggggagaagacgaataatcctccgaacggctgcctccgccggcggcctccggagcccgggccacggggggtgcggcggcggcgcacgggaggtttaaaaccggcccgggtccctggatgtgccagccgccgccgccgccgtgttggaggcagtagaaggggagagaccaactctccggcgttcccagccctggaaatggtgacaggcgactcagaccccctccctggagctgcagccgccgcggccgccgccgccgccgcttctcccccccgctccaggagcgggaggtgccgccgccgccgccgcgcctcagccggctcccgcccgagcccacggcttccaccttccctttcaggagaagccgaggaagaggctgcacggttagaaaagacgaagaggaggcgagaaacgccgccgctgccgccgccgcaggccggccggctccccgagggcgctgcccccgcggctgctcacaggcgctgagaggggctccgggccgcggccgccgccgtctctcatctccctcgcctgagcccggcctcgcctcacagcggctcaactctcaaacttccatcatggctgcagcttccgagaggagagaactgagcgcagtcgcgtcccagcgccgagcgcgtatcctgccgcagcgcataaagagtcccgccacatcaccgcccgccggcctgcccgccccctccgccgccgcgccgggagcccgggcgcctcggaagaccgaggggaggcgggaggcgagcgagaggcggacgggaccgcgccgggcgaggggagggcagggcagggcagggggcggtaggagggggcagagcggtagctctgggtgcgagcgcagagtccccaagccgcaggctctactgagcatgcccagtgtagctgcctggggcttgctcggg

SEQ ID NO: 944 - DNA, 4066 bp, Homo sapiens
caattcaattctacaacctagacatggaccaaaaatacagctagtttacaaaacacataaaatgcataaaaatcacataatcagaaagtcacatagtatcagacagagtgtattcactctgcaatataaaacacacacacaaaaaatccactcactagaagtcaagtgcttcactactaagagtgctgtggtacatctgggaaatcagtacagcccaagggggggaaaaataataatccctatgtacacataatggcctttactggacagataagcttattccatctttccccatattcaattaaaaaaatgaagaaaaaaatcctttagttctttacttctttcttcccacgtcttgggcctaaatcatattgagaatcctggccaaatgtggaaataggactcaataatacagagactgaatactttaaaagttcccatattatgttaatgcattacagattatattaagtgtccattttattgtaataaatgtaacttgacattcagttgcaagactccctcaaaaggctgaaattttcaaaaggaaatgctaaaaaatatacctctattgaccaaagtttacataactcatattaagtttattacatttgaggcagagtttactttatgtgaataaaaatgtatgatagttaagttgacctatcttcaacactaaagaaaatttaagattataacaaagtttaaaaattctacttcattatgctaataggaagtttttgccttttatattttaaagcaaatagtttttgattggcataattaattttactttggtcaacagtttgagttagcagagatttatttcccatttgtgatgaaccagcaaaatcacagacatgtcatacccagacttcctaaaggaatacccttatttttaaaaacacttataacttgaaacaaaatcctaacatggcccaaactgaggaaattcagttacaatcatacaccataaatgaaaatacaaataatttccctacatacataacctgaaattacagtttttcagagcagtagctaccatttaagtatttacaatgtggcaggtactatgctaaatgaaattacttattattatctcacttactattcaagataaacgtatgcggtaggttccattatcatccccattttacagataaaatagattgagaaaatctaaataacctactcaaagtcatccagctactaaatggaagatccaggattacaaaacaagcagtctggctccagagcccacactgcctccctaaaatctaaaatgaaacaatgtatatatgcttaaaagtatagataaacgtaatactcaaaattttaacataatttaaaatagatctgaccatatttaaaaactatagaacaatattctctaaggtagtcttttctttaaagaaacaaaaattcgttttttaataaatattaagataaaaggtttgctaactttgtatacacatacacacacagagaaatcaaacactggttagattcactgttcatatttgaagtggtgagtactgataataattatgtgtataattacttaaaatataatgtgtaaacagtcttctttttcacactatgtggaggtcaagaaaattcttttgatggcaggtacagctacaatatccatctctcaatattctcaacactggccaggcgcagtggctcacgcctgtaatcccagcattttgggaggccgaggcaggcggatcacttgaggtctggagtttgagaccagcctggccaaggtggtaaaaccccatctctactaaaagtacaaaaactatctgggcgtggtggcatgcacctataatcccagctgcttgggaggttcaggcaggagaatcgcctgaacctgggaggcagaggttccagtgagccgagatcctgccactgcaccccagactgggcgatagagcgagattccatctcaaaaaaaaaaaaaaaaaaaaaaaaattctcaacactgccaaaaagtaatgccttgaagatgtcctaataccttgaagatgttcacacatgtcccaatgtcaactgttgcaaatgaagaatctgccttaactatacagaactaaaacttcccaaataaaattaattcacccttaaattatgttactcttcttatatttgccgatacttatttattccagtgcaaattattttaaaagaattaaattgctaatacttcctctgcaaccaatgaaaaaaattcaaaaaactaagggaaaggtgaatagtcaagtacaatatactaatttcacctttcttggcaaattattttacattagtgaatgcatatactcaatatgtacaaagagaatcaccaaacacagaccaatatacttttaaccacctatggaagaacgtatatgtggcagtaatgcaccctataaaagacttacagttatcagtttgctcagcaaagccttaccaatttaaggttagtctaacctcaacattattctctctgataagcaactaaattaatttcaaagctaccaaatagaaagcaattgtaaaacagaactgactgaccccagtctcacaaatttcctaagtcactatcttcagaacaaatcctaacatcttttcttaatgaattcaggccacaagatgaattcttcaatgctgactgtgaaaatcaagtttaacagaaaaaatgaagaaaaaggtaacaagattaagaactaatgggttccatgtaataaaacttctgaactgtttgtttaacccaacggtttctacagaaaaaaaaaaatacatttcttaagctatgttaatattacattttctggaagctaaatccttgtagtatggcagaggcctcacatttcaattaagcagaaaattgtcatatgcatgcaacacttctacaattctctttacaaactctgaagtcacacacaatatcaataataaaagtgatttcctaagctttcgtcttacttaaaagattgagatgaaaatttaaaaatagcacgtttacttcaagtgaattaatgttaaaactttgtgaagtgaatttcccataacaaatactcctccattaaaagtcactgaagtgattacttcagaagcggcttaaaatatttttttaagtgttgcgctatcaccaaatgaacaaacagcaaatggaggcaaatttcaaaataacattagaaaataagaattgaagacttcttcacttccaaaaagtaagccatttcataacactaagaagtttatgtattttatgtggctatgagaaagcagatgcactgttccatacaaaaattaaaatatcaccagttgcctttcccatgttattaaaaataaaattctaaaaaggtaataaaggaatctttctttactatcttctaaaactaagtttaaaatgaaggtggttatacctcaccatattttattatctttaatcatttagtatttacttagtatattataagcaatgtaaatctgcattgatgactatactgctgtgcaaacttttacactggcagcaataaaattcctttttcctcatataaactgtacattactcctttcagttgtgctttacacttgaataagcactatgaaaaatgaagtttgtaagttatcatacagcaattaggtggtccagtcatgtttttcaggaaatataacttagcagatacaaaacaatgtaaaataaatgttgtgaatagaatactttttaaaaccctcatgattaatttcagtaatcacttaccttgaggtaatttaggtaacttcaatagtcactgtactctctacaagttaaaagtattccctgtgaacatttatttgaaaagaggcaaatctaccaaacaataaaaatacaacagaagcctaacgtttccacataccctaaatacacttaatttttctatagtctcaaattcagcactatatttcagactaatattaagcatataaccctactaacaaatttttagaataatttaattttgcgataatattttaaaactgaattattgtcctcaattttcctcggagaaatggcttcattattaatctttctttatca

SEQ ID NO: 945 - DNA, 4034 bp, Homo sapiens
tatcacgtgattccgcttatacgaggtacctagaatagtcaaatacatagagatgaaagtagaacaatggttggtactaacaggaggagcaatgaggagttattatttaatgggtgtggtatgtcagtgtgggataatgaaaaagttctagagatggacagtggtgacaattgcacaacaatgtaaatgtactgaatgctagatgttaatgctactgaactgtatgttttatatatatatatcatatatatcatatatatatcatatatatctcatatatatgagatatatctcatatatatatatacacacgcacacacatacacatatatataaaatatattatcacagtaacaaaattactcatctctggccctatttatcttcaaacctttattcctgcttctccccagatgcaatcaccctcaactactcggattctttttcctcctatttaattaggtattttaaaatattattcttaatactgcttcttacagatttattaactacagatgtcctgccatggtaaaggagacttacaaaactagcagtattccatacgtgtttcacttatcttaattcccctaaaatagcaacatcacaattttgggttaactcaaaccaccaatgctaataattgtttcctttttctaatttgctcagttttgcaagaatccattacatttttctccaaatatttcaacatccatctatcaatttgattattttcccggaagttctaatctcctgctccaagcaaaactggtaacttttcagcttgtgtcacagctgtcatcctgggactttcttctttgttgcttctgagtgggattctctgtttactgaagctcttttatttcctttcttggtttattcccttgttttgttgaaccacatcttctgggtaatgtccaaaaaaaatgttcttcatgagcacatttttttagtccttgagtttttccccctactttcacacttgattgatggtttaactggatacagaattctaggctgaatgcagaactttcaaggtgatgttttaccaccttctaccttcaattctactgccaacaagttagatgctattcatattcctaatccctcctaggcgattctaaaaagtttttagatattatctttatttctggtgtcctaaaacaaatttcataataatttgcctagtatagggtttcttttattgtgcttggcactatgtaggtcttttcaatctggatgtttctctcctttgttttctctttatgaatcctgttaattagagacaagatctctacaatgatcctatagcacattttaattgataaaattaacatataacactacaatattgtctaaagcagtctgtacatatacaaataatgtaataactaacatatataggtctaactactaattctatgagttatacagaatcaaagttacaatctcaaaaacagatgagaaatgacaatgaataatctgttcattgacagagacaggtcggacattacacagctccagctgatttttgtcacgcaggaatgtcagccaagtgttggaagatccttcgaaatttcaaaagcagctagaaatatagctttttatgtgaggtctcaatttttaaatataggtaatgtatttcaattttaaacatggtatgaatcaacagtgtgaggtcaaataaagaatattaacaagattagcccaagagttgtacacaagataatatggttcctaaggaaacaacttcggaatctgacagaccagaactcaaccttcagtctcactacttactaaaagtaatgcttggggaagttaacttcttttaaaccatctatgaaatggggatagatttactgtagagatttagtaagattatatacataaactggctatacaacagttacacatgcaaataagtatgtaaataaatgcccaataaatatctcctattattaacatacaaaaaaatgcattggtgtagataatataaacactgtcaaatccactaaggaattaagactaatgaaagaagtaggaggtggccagaacggtggctcacgcctataatcccagcactttgggaggccaaggcaggcagattacctaaggtcaggagttcaaggctagcctggccaacatggtgaaaccacgtttctactaaaaatacaaaaattagccaggcatgtggcgcgtgcctgtagtcccagctacgggaggctgaggcaggagaattgcttgaactcgggaggcagaggttgcaatgagatgagatcgccccattgcactacaacctgggaaacaaaccaagaccccgtctcaagatttaaaaaaaaaaaaaaaaaaaaaagcaagaggcacccaataagaacagggctttcttttggggtgataaaatgttttgaaacttgataaaggtagaggtaacactgtgaaggtaataaatgccacggaatgtacactttccgtggttaaaatggttagctgttatgtgaatttcactttattaaagaaaaaatgtgggaaaaacgaggtaatatgagagaaggagtcagaatatgctagaaacagagaatgaaactgatcattctttcctcttttgaagcctgcctataaataacatctctttaactccttttttaaactgaatagccaatactgatgttagggcaacaaatacttcctttttattgaaaatcaacatacaactaaggttgaaagactgagagatcaacatatttcaaatatttcaaaagaatatttgagactgggagtggaggctcacgcctgtaatcccagcactttgggaggctgagacaggtggactgcttgagttcaggagttcgagaccagcctggaaaacatggcgaaactctgcctctactaaaaatagaaaaattagccatgtacggtgacacacgcctgtggtcccagctacttgagaggatgaggtgggaggatcgctggagcccagaagtcgaggtgaaccatgatcacagcaccaccgtactccagcctgagtgaccgagcgagactctgtctcaaaaaaaaaggggcgagggggtgctcttgaatctattacacagctgcttatacatgggggaaaaagctcacagtgaacaagacaataaataaatctttttcaaaaatcactatatatcagaagactgtactctaaaagcatttccttataatataggactcatgccaccaacaaagaaaagaaaaaggaggtagagggaaagggaaagaacagaaaaggaaaagaaaagcatcatactagaatctcactcttgggagatttacaatgcatagtggcatattaaaggttctgcagtgagaaagacagttcacctctattaaacctccattctcctgatttataagaaacaaacaattcttaagttatgcctcttaaacacatgaagcaccaattttgttaaagactgcctagatttacaccaaataacataaattgaaaaacttcagtatcagcttgagggatgagattaacatacatattggccgggtgcagtggctcatgcctgtaatcccagcactttgggaggctgaggcaggcggatcgcttgagcgcaggagtttgagaccagcctgggaaacacagcgaaaccctatctctacaaaaaacacaaaaattagccaggcctggtgatgcgtggctgtggtcccagcaacttgggaggctgaggtgggaggatcacttgagcccagaaggcagaggttgcagtgagccgtgatcatgcctctgcaccccagcctgggtgacagagcaagaaactgccttaaaaaaaaaaaaaaaaaaaaaaaggtggcattccaagatggtcaaataggaacagctcctgtctgcagctcccagcatgatccacgcggaagacaggtgatttctgcatttccaactgaggtacctggttcttctcactgggactggttggaaagtgggtgcagcccacggagggtgagctgaagcagggcggggcattgcctcacccaggaagcacaaggggtcgggg

SEQ ID NO: 946 - DNA, 4042 bp, Homo sapiens
aggttcttttacattctgtctaaaagaatatatttcaatgtaataaaaactgcaaaattttatgtacactatgcacattttttgaggggagaacatttataccttccatcagactttaaaaggaatgtaacacaatttaagaccccctggcttaaatctagtgttctgcgcctccacattacaaaatttttctattttattacaaaaaattttttacctttttttccactaccaaaatatatgctgctcatcaactctgttttaaatttctaccatcgcttttgctactgcatttttttttttttttgagatggagtctccctctatcaccaggctggagtgcagtggcacagtctcggctcactgcaacctccacctcccgggttcaagcgattctcctgcctcagcatcctgagtagctgggattacaggcacgcgccaccacacccagctaatttttgtatttttagtagagatgaggtttcaccatgttggttggccaggatggtctcgatctcttgaccttgtgatccgcccgcctcggcctcccaaagtactgggattacaggcgtgagccgctgtgcccagcctgcatttttaatcagtaaaagcaattgtttccctgcagatgataatgggataaatcaaagtaaaaatctttagatcctcagctctataattcatgccagtgctatcattccaaggtgcaaacaatatgcagaaatgtaaggcaatctaccataatcttcaacattcaccaaaattatgcactaatgtaagattcaattttgtaaactatcaacaataaacagtatttcggcatccttatatataatgcaaaaaaagtcacaaaggataggaaacaagatataagagggggtaaaggaacaaggaatctatgcaattacacagctttaaatgattaatacgatcattctatttctgttttacagctgaattaagaagaaattagattaacatgaaggagaactctctaaatgagtttttctatctatctggaggggcttaggctttgtccttcttagagatggaaaaatgtacaaaatctctttgcattaaattttaacatgttttgccatacttaccacccaaagaaatatatcaacagcaaaattaaatcactgtaaaagttctcccaagagttttcttttttctttcagatgtactataagaattaaatttgtcactgatttttcaatatagtccttagttttctgatcaaagaatcgagaatcttctattaatctaactacatttatgaatattcttataaaagaataatttttatggattataaaagttcacactttactaggtaatggtattttatccaaaggcattctatgctcaaacaagcttcagaaatataaagcttatttttgattaatatgctttttaaaaatgttattttagaagaattttgtgagaccaaatctgcaatacagttaatgggtaacatgtgctagtatgatatgaaaatggtagcgtgaacagaaaaatgaaatcaatcagtcatttctcatatagaaattgaggcagcaactgatttaaaaatttagaagaaataaggattagcaactatctttaaaacctgttttccagggactgagggtggggagggaggaacacaagatgaacaagatctgaagctctactggacagcatagtgactatagttaataataacattgtataattgaaaattgtagcttgtagatcttaaatgctttcaccctggggggagaataataattatgtgaggtgatgaatatgttaagtagtttgactgtagtaatcatttcacaatgtatatacacatacatcaaaacatcatattatacattgtatttatatataatttttacttgtcaattacacctcaataaaactgaaggaaaaaaagaaacccaaaatctgttttccaataaattctcagatccaggaagaggaaaggaaaaacatcaaaaaataacttacctttttgtctctggtccttacttccccatagaaatctagggcctcttgtgcctttaaaaatttgccccgatgtaataaatatgcacatatcattacaccagttcgtccctttccagctttacagtgaattgctgcaacatgattgtcatcttcacttagccattggtcaagatcttcacaaaagggtttgataagttctagctgtggtgggttatggtcttcaaaaggatattgtgcaactgtggtaaaaagataacctcagaataagaaaaaaaaactcttgaatttttaattaacaagtaggtaactttagaaatgttgcatacaaacttaacaggtatttaaaagaaacactggattccagagaaaaataatgtattgcttaactttctaattgttaaatagaaaatagtctcttgataagtcttaaatataatcattaaggaagccaggtattattttcccccattttattcaggaggatatattctgggaatttacgctatacggactggtagcataggtcacatattagaggtagagctaaacccaaaatgaactgtcacatggacatttcgtcaggactctcaatgcaaaaggaataatactatttatagtatttatttcatcatcacaaaacatattccaaagacagaatagattactaataggataaactatgcaaagaactacatattacatttcataaaataaaaatgctaagtgtgttatttaaaggtggtcttgcaaatgttagtgttgtatacacatgtaatcattagggaagccaagtattattttcctccattttctgcaggagaatacattctgggaatctatgctcaatggactgcagcataggtcacataccagagatatgtgaaggcatacaccaaagaaattactcacaaaatgtatataattgttatcaaagtttcaggtcttctcacatgaattgtaagagtccaagacttctctgttcactatagtcagagttgaggtttttaaaaaaacttgtttagaaacaggactatagatatatcactattaattgctcttaatagtttctaccttagttccactctattaagatccttaaaaaccctggctgatattcaatgtactaacctgtgtcatctaaatatgtgagaagtatgtcttatatctccaatcaggtgactcataatatggtacaggatataatcaattatcctttggtgtgacaggagagatcttctggtagacaatgactatcattataaggagtcagcaggacagctttcacttagtcatctgcctaacttcattttcccagtggtacacaaaaacctccaggaaaatctgttaaatatctgtttaaagcaagataaacctcaactaaagcctgctttgcttagtaagcaacagcctaaatccaccaaaaacaaaaacaaaaaaaacccgttcttagtaaacctatactaaatctcaatcattagtgatttagaattttcaaaccatttgtctgaaagtccattctagattttcaggagggatcaatggcaaatacatcaatagtagctcatggcacccactttctttttgactatcacagcagcatctgccaagcttctcaactcttcagttttctcatggtttaaagtgttaagccatgagaactgagttgtatttcacaaataaaagtgaaagtttttgtgggctctgagaattaacttatgtctgaagtagaaactcatttaaagcagttccctcctctcatccatcagactcctcttatcaacatttgttatatcctttcctaccttttatgtcattcctcaacacagaagagttaagtagttctgctttctccctgtgattgcttactattagaccaactgcctcaaatagtaggtaaaccctctccttatactatttttagtctaggaattttcctaattcttagtctatgctgcactttagtcttcctgacaatattaatagctttatgcaatactttttcctaaaacacaacagtaaaattaaaatttttgaaatttttaaa

SEQ ID NO: 947 - DNA, 4058 bp, Homo sapiens
gagattaattattttgaacagtctcaaaattcttttgcagttccaggatttgtggacttgatagtatagaaagaaatttaacagtgtatcagaggactcaaattttcctctgaatgctaatattaactggataatattgatcacaacacttccccttcctgtgcctgtttgatcatctataagaaacattcctggaagaaaaaaaaaaaaaaacctaccactgactttaatccgtatctagttttctaatgctgtttcaacctaaacacaaatgctactgttcagtaaaatatggtcaaccaacagcatctgctccattttttttgcctttttaaataaacacagggataaagaaggtaagaacacgaggatactcctttagattctgtgaataattcatccgaaatatggtctaagtatattaattaagcatgagccaagtatagtagatttcagttatttattttgactccaagacacaaaaagcaatcaatttcagtgaaattacttaactctgagtcttaatattatgtaacagctaaatataacaattttaatatctacattcttaacactgtatgtacagatctccattttctattaactattagcccatcaatctcttttcacttgggggatattccaacctatgcaaggatggagaatatacagctactagagcagttctactgatgaagtaaatactattacattttaccacatgatattataaactttgcattttattttcataacactattcttgctatctttcattctggccctatttcacaacaccctacaggacttacgatttcatcaaatagtctcccctcacctctgaagagaaacagaattgatagtattaccagactgtaatgactagaatatcttcccattggcaaatttaaaatatgtccttactttttgattatggagccttctcttggatttaatttggactggaaacagaaaataaaatacaataaagtttaaatgcccttgggttttacttttatccctgaacatgatgacatggactatcccaagtccttcttaaatggcaagttctcatcatcagcagagcacagccaactattctgaagaagcagatacatcagacagggtatgtatgcatatgtgtgtgggtgagagtgtataagaaggaggaaagagggagaaaaagagaccacatgtgagagcacagttaagttggaaaagcctagaccattacaaaaactatttgttccaattaaaaatcattgattaaatcatcctactaggatattgattgtaatgctaaacaaacaaaaagtcacacagttgaacagtgaaggcaagtatcttagaaagagtcaaatatacttgtagcatgaagaagaataagactgttgcaatacctctatcaaatacttttctccattccaaaaaaaaccctgacattaaaaaaacaataataaagtaggtcacaaaaagattggaagtaccacctttcttcagatatgatttctcagtatagccggctacaagttttcatcaaatgcaagcatggtgacacaatcaaggaaacattcccattttggaatctttttggaagcttcagaaaacattaacactttcaaaatggtaaagtttctttaccaaaaaacttctcctgaagaaacctcagtattctgtaggcagacagtacaccttactgccagacaacacatctgatattggggcactggtaaagacagaagctctccatgtcatggtcacccactgctctcttcatcagtatgcgctagggtgcaagactgtcatcaatcctgaaagaaatcttatctcttgttgtgaaagtattctactgtttcaagtgccaacccttgaataattccctgtgtaagatgatttgtcatgaaaaatccactattgtgaaagctgccagattcatgaaagccaagactttcaatcaagagcttctcgagaggttttgtcaagaaatgggagcactatgaagttctttgctatatataagttccctgctttcagaagacaaattctacagcctgatactgctgtttacaggataacatacactctttttaaacagtttaactcttcaaccttgaaagtaaaatgtggagtcataatcttttctttcctaacacagcattaatgatacagatcttgccaaaaatgatctcagtaacttgaaggcaaagaaaatgatgaaacatgaatttatctgaagagccttggagaattcttatttcttgacacgtctactttcatcaggcaatagaatctacagattccatttactcttctttcttttgtaaaatagcattttcagcactttttaccaaagtcaacactgattggatatcaaagatcatataaaagttgcaaagtcaaagtcaaagagcatagtttcaacttgttattttaaaagttaaatagcagtcttttcattaaaatttagtattgaacagaactaaagcttaattttggttaatttgtaccacttagatttattcattgctctcatgtagtagccactggtttttgcataaaaaagtgacatagttttcatgaaggttcttttacattctgtctaaaagaatatatttcaatgtaataaaaactgcaaaattttatgtacactatgcacattttttgaggggagaacatttataccttccatcagactttaaaaggaatgtaacacaatttaagaccccctggcttaaatctagtgttctgcgcctccacattacaaaatttttctattttattacaaaaaattttttacctttttttccactaccaaaatatatgctgctcatcaactctgttttaaatttctaccatcgcttttgctactgcatttttttttttttttgagatggagtctccctctatcaccaggctggagtgcagtggcacagtctcggctcactgcaacctccacctcccgggttcaagcgattctcctgcctcagcatcctgagtagctgggattacaggcacgcgccaccacacccagctaatttttgtatttttagtagagatgaggtttcaccatgttggttggccaggatggtctcgatctcttgaccttgtgatccgcccgcctcggcctcccaaagtactgggattacaggcgtgagccgctgtgcccagcctgcatttttaatcagtaaaagcaattgtttccctgcagatgataatgggataaatcaaagtaaaaatctttagatcctcagctctataattcatgccagtgctatcattccaaggtgcaaacaatatgcagaaatgtaaggcaatctaccataatcttcaacattcaccaaaattatgcactaatgtaagattcaattttgtaaactatcaacaataaacagtatttcggcatccttatatataatgcaaaaaaagtcacaaaggataggaaacaagatataagagggggtaaaggaacaaggaatctatgcaattacacagctttaaatgattaatacgatcattctatttctgttttacagctgaattaagaagaaattagattaacatgaaggagaactctctaaatgagtttttctatctatctggaggggcttaggctttgtccttcttagagatggaaaaatgtacaaaatctctttgcattaaattttaacatgttttgccatacttaccacccaaagaaatatatcaacagcaaaattaaatcactgtaaaagttctcccaagagttttcttttttctttcagatgtactataagaattaaatttgtcactgatttttcaatatagtccttagttttctgatcaaagaatcgagaatcttctattaatctaactacatttatgaatattcttataaaagaataatttttatggattataaaagttcacactttactaggtaatggtattttatccaaaggcattctatgctcaaacaagcttcagaaatataaagcttatttttgattaatatgctttttaaaaatgttattttagaagaattttgtgagaccaaatctgcaatacagttaatgggtaac

SEQ ID NO: 948 - DNA, 4111 bp, Homo sapiens
taaaagattaaaaattatttcaccagtattctaaccaacaggcaaacaagtggtatctttgaaagttttaaaacaattacatttcaagtattttacagaagcctgcagtattatatttccaagaccaacaacctcaatctgtccaaattccctttaagtcaggagtcattaaatgctttagcatttgtaaggaagcatttgtaaggaaaggtataagctgaggagcctttcaaaataagaccaattttatcagcatttcataaccttgcaggaaagcctgagcctatacagagattaattattttgaacagtctcaaaattcttttgcagttccaggatttgtggacttgatagtatagaaagaaatttaacagtgtatcagaggactcaaattttcctctgaatgctaatattaactggataatattgatcacaacacttccccttcctgtgcctgtttgatcatctataagaaacattcctggaagaaaaaaaaaaaaaaacctaccactgactttaatccgtatctagttttctaatgctgtttcaacctaaacacaaatgctactgttcagtaaaatatggtcaaccaacagcatctgctccattttttttgcctttttaaataaacacagggataaagaaggtaagaacacgaggatactcctttagattctgtgaataattcatccgaaatatggtctaagtatattaattaagcatgagccaagtatagtagatttcagttatttattttgactccaagacacaaaaagcaatcaatttcagtgaaattacttaactctgagtcttaatattatgtaacagctaaatataacaattttaatatctacattcttaacactgtatgtacagatctccattttctattaactattagcccatcaatctcttttcacttgggggatattccaacctatgcaaggatggagaatatacagctactagagcagttctactgatgaagtaaatactattacattttaccacatgatattataaactttgcattttattttcataacactattcttgctatctttcattctggccctatttcacaacaccctacaggacttacgatttcatcaaatagtctcccctcacctctgaagagaaacagaattgatagtattaccagactgtaatgactagaatatcttcccattggcaaatttaaaatatgtccttactttttgattatggagccttctcttggatttaatttggactggaaacagaaaataaaatacaataaagtttaaatgcccttgggttttacttttatccctgaacatgatgacatggactatcccaagtccttcttaaatggcaagttctcatcatcagcagagcacagccaactattctgaagaagcagatacatcagacagggtatgtatgcatatgtgtgtgggtgagagtgtataagaaggaggaaagagggagaaaaagagaccacatgtgagagcacagttaagttggaaaagcctagaccattacaaaaactatttgttccaattaaaaatcattgattaaatcatcctactaggatattgattgtaatgctaaacaaacaaaaagtcacacagttgaacagtgaaggcaagtatcttagaaagagtcaaatatacttgtagcatgaagaagaataagactgttgcaatacctctatcaaatacttttctccattccaaaaaaaaccctgacattaaaaaaacaataataaagtaggtcacaaaaagattggaagtaccacctttcttcagatatgatttctcagtatagccggctacaagttttcatcaaatgcaagcatggtgacacaatcaaggaaacattcccattttggaatctttttggaagcttcagaaaacattaacactttcaaaatggtaaagtttctttaccaaaaaacttctcctgaagaaacctcagtattctgtaggcagacagtacaccttactgccagacaacacatctgatattggggcactggtaaagacagaagctctccatgtcatggtcacccactgctctcttcatcagtatgcgctagggtgcaagactgtcatcaatcctgaaagaaatcttatctcttgttgtgaaagtattctactgtttcaagtgccaacccttgaataattccctgtgtaagatgatttgtcatgaaaaatccactattgtgaaagctgccagattcatgaaagccaagactttcaatcaagagcttctcgagaggttttgtcaagaaatgggagcactatgaagttctttgctatatataagttccctgctttcagaagacaaattctacagcctgatactgctgtttacaggataacatacactctttttaaacagtttaactcttcaaccttgaaagtaaaatgtggagtcataatcttttctttcctaacacagcattaatgatacagatcttgccaaaaatgatctcagtaacttgaaggcaaagaaaatgatgaaacatgaatttatctgaagagccttggagaattcttatttcttgacacgtctactttcatcaggcaatagaatctacagattccatttactcttctttcttttgtaaaatagcattttcagcactttttaccaaagtcaacactgattggatatcaaagatcatataaaagttgcaaagtcaaagtcaaagagcatagtttcaacttgttattttaaaagttaaatagcagtcttttcattaaaatttagtattgaacagaactaaagcttaattttggttaatttgtaccacttagatttattcattgctctcatgtagtagccactggtttttgcataaaaaagtgacatagttttcatgaaggttcttttacattctgtctaaaagaatatatttcaatgtaataaaaactgcaaaattttatgtacactatgcacattttttgaggggagaacatttataccttccatcagactttaaaaggaatgtaacacaatttaagaccccctggcttaaatctagtgttctgcgcctccacattacaaaatttttctattttattacaaaaaattttttacctttttttccactaccaaaatatatgctgctcatcaactctgttttaaatttctaccatcgcttttgctactgcatttttttttttttttgagatggagtctccctctatcaccaggctggagtgcagtggcacagtctcggctcactgcaacctccacctcccgggttcaagcgattctcctgcctcagcatcctgagtagctgggattacaggcacgcgccaccacacccagctaatttttgtatttttagtagagatgaggtttcaccatgttggttggccaggatggtctcgatctcttgaccttgtgatccgcccgcctcggcctcccaaagtactgggattacaggcgtgagccgctgtgcccagcctgcatttttaatcagtaaaagcaattgtttccctgcagatgataatgggataaatcaaagtaaaaatctttagatcctcagctctataattcatgccagtgctatcattccaaggtgcaaacaatatgcagaaatgtaaggcaatctaccataatcttcaacattcaccaaaattatgcactaatgtaagattcaattttgtaaactatcaacaataaacagtatttcggcatccttatatataatgcaaaaaaagtcacaaaggataggaaacaagatataagagggggtaaaggaacaaggaatctatgcaattacacagctttaaatgattaatacgatcattctatttctgttttacagctgaattaagaagaaattagattaacatgaaggagaactctctaaatgagtttttctatctatctggaggggcttaggctttgtccttcttagagatggaaaaatgtacaaaatctctttgcattaaattttaacatgttttgccatacttaccacccaaagaaatatatcaacagcaaaattaaatcactgtaaaagttctcccaagagttttcttttttctttcagatgtactataagaattaaatttgtcactgatttttcaatatagtccttagttttctgatc

SEQ ID NO: 949 - DNA, 4022 bp, Homo sapiens
tagctaagttttcttatgatgaaattagttattcataaaagattaaaaattatttcaccagtattctaaccaacaggcaaacaagtggtatctttgaaagttttaaaacaattacatttcaagtattttacagaagcctgcagtattatatttccaagaccaacaacctcaatctgtccaaattccctttaagtcaggagtcattaaatgctttagcatttgtaaggaagcatttgtaaggaaaggtataagctgaggagcctttcaaaataagaccaattttatcagcatttcataaccttgcaggaaagcctgagcctatacagagattaattattttgaacagtctcaaaattcttttgcagttccaggatttgtggacttgatagtatagaaagaaatttaacagtgtatcagaggactcaaattttcctctgaatgctaatattaactggataatattgatcacaacacttccccttcctgtgcctgtttgatcatctataagaaacattcctggaagaaaaaaaaaaaaaaacctaccactgactttaatccgtatctagttttctaatgctgtttcaacctaaacacaaatgctactgttcagtaaaatatggtcaaccaacagcatctgctccattttttttgcctttttaaataaacacagggataaagaaggtaagaacacgaggatactcctttagattctgtgaataattcatccgaaatatggtctaagtatattaattaagcatgagccaagtatagtagatttcagttatttattttgactccaagacacaaaaagcaatcaatttcagtgaaattacttaactctgagtcttaatattatgtaacagctaaatataacaattttaatatctacattcttaacactgtatgtacagatctccattttctattaactattagcccatcaatctcttttcacttgggggatattccaacctatgcaaggatggagaatatacagctactagagcagttctactgatgaagtaaatactattacattttaccacatgatattataaactttgcattttattttcataacactattcttgctatctttcattctggccctatttcacaacaccctacaggacttacgatttcatcaaatagtctcccctcacctctgaagagaaacagaattgatagtattaccagactgtaatgactagaatatcttcccattggcaaatttaaaatatgtccttactttttgattatggagccttctcttggatttaatttggactggaaacagaaaataaaatacaataaagtttaaatgcccttgggttttacttttatccctgaacatgatgacatggactatcccaagtccttcttaaatggcaagttctcatcatcagcagagcacagccaactattctgaagaagcagatacatcagacagggtatgtatgcatatgtgtgtgggtgagagtgtataagaaggaggaaagagggagaaaaagagaccacatgtgagagcacagttaagttggaaaagcctagaccattacaaaaactatttgttccaattaaaaatcattgattaaatcatcctactaggatattgattgtaatgctaaacaaacaaaaagtcacacagttgaacagtgaaggcaagtatcttagaaagagtcaaatatacttgtagcatgaagaagaataagactgttgcaatacctctatcaaatacttttctccattccaaaaaaaaccctgacattaaaaaaacaataataaagtaggtcacaaaaagattggaagtaccacctttcttcagatatgatttctcagtatagccggctacaagttttcatcaaatgcaagcatggtgacacaatcaaggaaacattcccattttggaatctttttggaagcttcagaaaacattaacactttcaaaatggtaaagtttctttaccaaaaaacttctcctgaagaaacctcagtattctgtaggcagacagtacaccttactgccagacaacacatctgatattggggcactggtaaagacagaagctctccatgtcatggtcacccactgctctcttcatcagtatgcgctagggtgcaagactgtcatcaatcctgaaagaaatcttatctcttgttgtgaaagtattctactgtttcaagtgccaacccttgaataattccctgtgtaagatgatttgtcatgaaaaatccactattgtgaaagctgccagattcatgaaagccaagactttcaatcaagagcttctcgagaggttttgtcaagaaatgggagcactatgaagttctttgctatatataagttccctgctttcagaagacaaattctacagcctgatactgctgtttacaggataacatacactctttttaaacagtttaactcttcaaccttgaaagtaaaatgtggagtcataatcttttctttcctaacacagcattaatgatacagatcttgccaaaaatgatctcagtaacttgaaggcaaagaaaatgatgaaacatgaatttatctgaagagccttggagaattcttatttcttgacacgtctactttcatcaggcaatagaatctacagattccatttactcttctttcttttgtaaaatagcattttcagcactttttaccaaagtcaacactgattggatatcaaagatcatataaaagttgcaaagtcaaagtcaaagagcatagtttcaacttgttattttaaaagttaaatagcagtcttttcattaaaatttagtattgaacagaactaaagcttaattttggttaatttgtaccacttagatttattcattgctctcatgtagtagccactggtttttgcataaaaaagtgacatagttttcatgaaggttcttttacattctgtctaaaagaatatatttcaatgtaataaaaactgcaaaattttatgtacactatgcacattttttgaggggagaacatttataccttccatcagactttaaaaggaatgtaacacaatttaagaccccctggcttaaatctagtgttctgcgcctccacattacaaaatttttctattttattacaaaaaattttttacctttttttccactaccaaaatatatgctgctcatcaactctgttttaaatttctaccatcgcttttgctactgcatttttttttttttttgagatggagtctccctctatcaccaggctggagtgcagtggcacagtctcggctcactgcaacctccacctcccgggttcaagcgattctcctgcctcagcatcctgagtagctgggattacaggcacgcgccaccacacccagctaatttttgtatttttagtagagatgaggtttcaccatgttggttggccaggatggtctcgatctcttgaccttgtgatccgcccgcctcggcctcccaaagtactgggattacaggcgtgagccgctgtgcccagcctgcatttttaatcagtaaaagcaattgtttccctgcagatgataatgggataaatcaaagtaaaaatctttagatcctcagctctataattcatgccagtgctatcattccaaggtgcaaacaatatgcagaaatgtaaggcaatctaccataatcttcaacattcaccaaaattatgcactaatgtaagattcaattttgtaaactatcaacaataaacagtatttcggcatccttatatataatgcaaaaaaagtcacaaaggataggaaacaagatataagagggggtaaaggaacaaggaatctatgcaattacacagctttaaatgattaatacgatcattctatttctgttttacagctgaattaagaagaaattagattaacatgaaggagaactctctaaatgagtttttctatctatctggaggggcttaggctttgtccttcttagagatggaaaaatgtacaaaatctctttgcattaaattttaacatgttttgccatacttaccacccaaagaa

SEQ ID NO: 950 - DNA, 4057 bp, Homo sapiens
actttttccctaaaagtttaaccaaagaaaaaataagaggccaggcacagtgactcatgcctgtaatctcagcactttgggaggccgaggtgggcggatcacttgaggtcaagagttcaagaccagtctggccaacatggcgaaaccccatctctactaaaaatacaaaaattagccaggcgtgggggcaggcgcctgtaatcccagctgctcgggaggctgaggcaggagaatcgcttgaactcaggaggtagaggttgcagtgagctgagatgttgccactgcactccagcctgggtgattgagtgagactgtctcaaacaaaaaaacaaaacaaacaagcaaaaaaaaaaaaaaaaaaaaaaaacaaaaaaagggaaataaatatgaatgtttactttatgtgccatcattctggaacacagctgggggtatgcatgggacagggagaaggcaagggagagggaaacagcagtagtgtttctaagtaactttgtcatgtaaaaggagtttacctctttaaactcaaattttggaagtcctttcaaaaatacatacttactagcattctcaggatgttttaactctttcttcatagtttaaacatgtgagttatctaatattgaaacttaagtgcagatgcagatagtgtggagcacaggactagatgagaaccaaccctagaagttgccctgtggcatgctttcttggaagaaaaaaatcaccaacagcttacttttgaataatcttcacatgttcataaagcaaaagtgtcaaatatacaaatgaatgactcctaaggaagtgtaacacaattatcttcttgtaaattagtgaataagacagaaggaggcttccttcccttaagcggttacctcactctcagaacatttttctttataataactatcagttgtctgacttctctgcaacactgaaaacccaaagtattatttgggcattactaacctaatgcgttattttatggtcaacttgtacccaccactctgccatctaatttgcaccatgtctgctgaggatatgtcaagactctgagccagattattttgaagagacctctgcaaagtctacaaattctttaccaaaatatgactgcctcatctcccttcaaaaaagaaagggggaaaaaagattcttcttctatataaatgtcactagaacataattttctccagcttcttaatgtttgtctataattaaaattaaggatataagcaaaataacattaaagataattctaataaagttaaccccatacaaactgaaaagtagataaaatgcatgtatctcctataatggtgattcacaattacaaaaatgcaaatccacaggctcaatctacaaggaaatactgacaagaagagaataaacctattatgagatattccaagaataaaactactttagataatcaactacatttattataagatagttactcctcaggaagaattccacagttgtataacaacagctttaccatgcttagctaagttttcttatgatgaaattagttattcataaaagattaaaaattatttcaccagtattctaaccaacaggcaaacaagtggtatctttgaaagttttaaaacaattacatttcaagtattttacagaagcctgcagtattatatttccaagaccaacaacctcaatctgtccaaattccctttaagtcaggagtcattaaatgctttagcatttgtaaggaagcatttgtaaggaaaggtataagctgaggagcctttcaaaataagaccaattttatcagcatttcataaccttgcaggaaagcctgagcctatacagagattaattattttgaacagtctcaaaattcttttgcagttccaggatttgtggacttgatagtatagaaagaaatttaacagtgtatcagaggactcaaattttcctctgaatgctaatattaactggataatattgatcacaacacttccccttcctgtgcctgtttgatcatctataagaaacattcctggaagaaaaaaaaaaaaaaacctaccactgactttaatccgtatctagttttctaatgctgtttcaacctaaacacaaatgctactgttcagtaaaatatggtcaaccaacagcatctgctccattttttttgcctttttaaataaacacagggataaagaaggtaagaacacgaggatactcctttagattctgtgaataattcatccgaaatatggtctaagtatattaattaagcatgagccaagtatagtagatttcagttatttattttgactccaagacacaaaaagcaatcaatttcagtgaaattacttaactctgagtcttaatattatgtaacagctaaatataacaattttaatatctacattcttaacactgtatgtacagatctccattttctattaactattagcccatcaatctcttttcacttgggggatattccaacctatgcaaggatggagaatatacagctactagagcagttctactgatgaagtaaatactattacattttaccacatgatattataaactttgcattttattttcataacactattcttgctatctttcattctggccctatttcacaacaccctacaggacttacgatttcatcaaatagtctcccctcacctctgaagagaaacagaattgatagtattaccagactgtaatgactagaatatcttcccattggcaaatttaaaatatgtccttactttttgattatggagccttctcttggatttaatttggactggaaacagaaaataaaatacaataaagtttaaatgcccttgggttttacttttatccctgaacatgatgacatggactatcccaagtccttcttaaatggcaagttctcatcatcagcagagcacagccaactattctgaagaagcagatacatcagacagggtatgtatgcatatgtgtgtgggtgagagtgtataagaaggaggaaagagggagaaaaagagaccacatgtgagagcacagttaagttggaaaagcctagaccattacaaaaactatttgttccaattaaaaatcattgattaaatcatcctactaggatattgattgtaatgctaaacaaacaaaaagtcacacagttgaacagtgaaggcaagtatcttagaaagagtcaaatatacttgtagcatgaagaagaataagactgttgcaatacctctatcaaatacttttctccattccaaaaaaaaccctgacattaaaaaaacaataataaagtaggtcacaaaaagattggaagtaccacctttcttcagatatgatttctcagtatagccggctacaagttttcatcaaatgcaagcatggtgacacaatcaaggaaacattcccattttggaatctttttggaagcttcagaaaacattaacactttcaaaatggtaaagtttctttaccaaaaaacttctcctgaagaaacctcagtattctgtaggcagacagtacaccttactgccagacaacacatctgatattggggcactggtaaagacagaagctctccatgtcatggtcacccactgctctcttcatcagtatgcgctagggtgcaagactgtcatcaatcctgaaagaaatcttatctcttgttgtgaaagtattctactgtttcaagtgccaacccttgaataattccctgtgtaagatgatttgtcatgaaaaatccactattgtgaaagctgccagattcatgaaagccaagactttcaatcaagagcttctcgagaggttttgtcaagaaatgggagcactatgaagttctttgctatatataagttccctgctttcagaagacaaattctacagcctgatactgctgtttacaggataacatacactctttttaaacagtttaactcttcaaccttgaaagtaaaatgtggagtcataatcttttctttcctaacacagcattaatgatacagatcttgccaaaaatgatctcagtaacttgaaggcaaagaaaatgatgaaacatgaa

SEQ ID NO: 951 - DNA, 4045 bp, Homo sapiens
cttaaataatgtgtatcatagtaacatggtttggcccaggaaaattcaaatgttaagaaaaataagaacgccacattggaagatttttaaaaagacagtaattatagtttgttttaaataaagaggaagtaagaaaatttcattaggttataacatgtagaaatttagtaaacaggctagaaaaaataacctgatttaagattaggtcatgaaaattcattccccagagaaaccaaacattttccttgagatcatttaaagatacaactattatttctagaagatttgtctttattaagaataagctcaatgaactcatgtacacaagagttcctaacatagagaaactttaataatttatttaaaaacaaaaagaaaattaaaagcagctcaaactttttccctaaaagtttaaccaaagaaaaaataagaggccaggcacagtgactcatgcctgtaatctcagcactttgggaggccgaggtgggcggatcacttgaggtcaagagttcaagaccagtctggccaacatggcgaaaccccatctctactaaaaatacaaaaattagccaggcgtgggggcaggcgcctgtaatcccagctgctcgggaggctgaggcaggagaatcgcttgaactcaggaggtagaggttgcagtgagctgagatgttgccactgcactccagcctgggtgattgagtgagactgtctcaaacaaaaaaacaaaacaaacaagcaaaaaaaaaaaaaaaaaaaaaaaacaaaaaaagggaaataaatatgaatgtttactttatgtgccatcattctggaacacagctgggggtatgcatgggacagggagaaggcaagggagagggaaacagcagtagtgtttctaagtaactttgtcatgtaaaaggagtttacctctttaaactcaaattttggaagtcctttcaaaaatacatacttactagcattctcaggatgttttaactctttcttcatagtttaaacatgtgagttatctaatattgaaacttaagtgcagatgcagatagtgtggagcacaggactagatgagaaccaaccctagaagttgccctgtggcatgctttcttggaagaaaaaaatcaccaacagcttacttttgaataatcttcacatgttcataaagcaaaagtgtcaaatatacaaatgaatgactcctaaggaagtgtaacacaattatcttcttgtaaattagtgaataagacagaaggaggcttccttcccttaagcggttacctcactctcagaacatttttctttataataactatcagttgtctgacttctctgcaacactgaaaacccaaagtattatttgggcattactaacctaatgcgttattttatggtcaacttgtacccaccactctgccatctaatttgcaccatgtctgctgaggatatgtcaagactctgagccagattattttgaagagacctctgcaaagtctacaaattctttaccaaaatatgactgcctcatctcccttcaaaaaagaaagggggaaaaaagattcttcttctatataaatgtcactagaacataattttctccagcttcttaatgtttgtctataattaaaattaaggatataagcaaaataacattaaagataattctaataaagttaaccccatacaaactgaaaagtagataaaatgcatgtatctcctataatggtgattcacaattacaaaaatgcaaatccacaggctcaatctacaaggaaatactgacaagaagagaataaacctattatgagatattccaagaataaaactactttagataatcaactacatttattataagatagttactcctcaggaagaattccacagttgtataacaacagctttaccatgcttagctaagttttcttatgatgaaattagttattcataaaagattaaaaattatttcaccagtattctaaccaacaggcaaacaagtggtatctttgaaagttttaaaacaattacatttcaagtattttacagaagcctgcagtattatatttccaagaccaacaacctcaatctgtccaaattccctttaagtcaggagtcattaaatgctttagcatttgtaaggaagcatttgtaaggaaaggtataagctgaggagcctttcaaaataagaccaattttatcagcatttcataaccttgcaggaaagcctgagcctatacagagattaattattttgaacagtctcaaaattcttttgcagttccaggatttgtggacttgatagtatagaaagaaatttaacagtgtatcagaggactcaaattttcctctgaatgctaatattaactggataatattgatcacaacacttccccttcctgtgcctgtttgatcatctataagaaacattcctggaagaaaaaaaaaaaaaaacctaccactgactttaatccgtatctagttttctaatgctgtttcaacctaaacacaaatgctactgttcagtaaaatatggtcaaccaacagcatctgctccattttttttgcctttttaaataaacacagggataaagaaggtaagaacacgaggatactcctttagattctgtgaataattcatccgaaatatggtctaagtatattaattaagcatgagccaagtatagtagatttcagttatttattttgactccaagacacaaaaagcaatcaatttcagtgaaattacttaactctgagtcttaatattatgtaacagctaaatataacaattttaatatctacattcttaacactgtatgtacagatctccattttctattaactattagcccatcaatctcttttcacttgggggatattccaacctatgcaaggatggagaatatacagctactagagcagttctactgatgaagtaaatactattacattttaccacatgatattataaactttgcattttattttcataacactattcttgctatctttcattctggccctatttcacaacaccctacaggacttacgatttcatcaaatagtctcccctcacctctgaagagaaacagaattgatagtattaccagactgtaatgactagaatatcttcccattggcaaatttaaaatatgtccttactttttgattatggagccttctcttggatttaatttggactggaaacagaaaataaaatacaataaagtttaaatgcccttgggttttacttttatccctgaacatgatgacatggactatcccaagtccttcttaaatggcaagttctcatcatcagcagagcacagccaactattctgaagaagcagatacatcagacagggtatgtatgcatatgtgtgtgggtgagagtgtataagaaggaggaaagagggagaaaaagagaccacatgtgagagcacagttaagttggaaaagcctagaccattacaaaaactatttgttccaattaaaaatcattgattaaatcatcctactaggatattgattgtaatgctaaacaaacaaaaagtcacacagttgaacagtgaaggcaagtatcttagaaagagtcaaatatacttgtagcatgaagaagaataagactgttgcaatacctctatcaaatacttttctccattccaaaaaaaaccctgacattaaaaaaacaataataaagtaggtcacaaaaagattggaagtaccacctttcttcagatatgatttctcagtatagccggctacaagttttcatcaaatgcaagcatggtgacacaatcaaggaaacattcccattttggaatctttttggaagcttcagaaaacattaacactttcaaaatggtaaagtttctttaccaaaaaacttctcctgaagaaacctcagtattctgtaggcagacagtacaccttactgccagacaacacatctgatattggggcactggtaaagacagaagctctccatgtcatggtcacccactgctctcttcatcagtatgcgctagggtgcaagactgtcatcaatcctgaaaga

SEQ ID NO: 952 - DNA, 4040 bp, Homo sapiens
taatacagtggtctataacagagagtcaagtgcctttacatgcctagtgaaaataactgtcaaaacaaccttacatgttaggtatttccatttccaaggggaggtagctaaggcccagaaaggttagggaacttgttaaaggctacatatctattaaaagtaggtagtggatgtgagatttaaatcagaaatgacttcaaatcccttcttcattatattatattgacagcccctccctcccctattatccaagagtcattatcaattcttctcttacaaccaacatccactgcatcagtaaactctttaagttaatctgacagcttcttgttacccttcactgccactattctaagcagtgaggggcaacaagaagcaaacatcttctctcatctttactaaactattcaagtacctcttaactgatctctcagcttcctttattaccccttctccctactttcctcactcatctgtattttgaaagcatgaacacagggaatattaaacacaaaattcagattacatccttcctatgctgaacacacactagtgtctttacacttggactggttttcttgtccactctgtttcagtcaaaatgacttatccactcttcagatataccaagctcattctcttgtctaagggcttttgcatctgtactcttaactcttttcccagatatttgtataactcacttatatgatttaggcctctgcttaaatgttatctgcttggttgggccttctctaatcatctttgctaaaaaacaaaaaacatacaaaccaagattactttctatcctgtctattttttatagcacttactactatatgacattgtatttgtttactaataatggagtttttatttgtaatcacaaatataaaacatcttgcaatattaaaatagaaaacaataaaactaaagggaaaaagacattttaaaagttaatggctgagcaaaatgcagatttagagaaaagaaaggaaacctgtggattctaaagagaatgtctagcccggaggacatgatgttaagtaaaataagtcaggtacagaaagataaataccgtatgttctcactcatatatggaagctaaaaaagttgagctcataagagtgtggttattagaggccgggaaagggagtgggaggggaggatagggagatgttggttaaaagataaaaaattacacacaggaggaataaattatagtgttctatagaactgtaactagtcaacaataatttactgtatattttcaaatagctagaagacagaattttgaatgttcctaacacaaagaaatgacaaatgtttgaggtgatccatatgctaattatcctgatttgatcatcacacactgcatacatgaaaatatcactctgtatcccataaatatgtacaattattatatattaaaaatttttttaaagggaaacttctgaacacttaaaaaaaatttaagggctaaagacatttaatattagatctattttcacttaaaacgtgcaggggcccaagtattactattactaccaatatacatacatacatacatacatatatgtatgtatattggtagtaatagtgtgtgtgtgtgtgtgtgtgtgtgtgtgtgtgtgtatatattttttttttttttttttttttaagacagagtcttgctctgttgcccaggctgaagtgcacgtgcactggtgtgatctcggctcactgcaacctccatctcacaggctcaagcaattcttgtgcctcagcctcccaagtagctgggattacaggtgtgcgacaccatgcccagctaatttttgtatttgtagtgcagatagggtttcgccatattggccggctggtcttaaactcctgggcctcaagtgatccgcctgccttagcctcccaaagtgctgggattacaggtgaagtattactagcaatattcttaatactcagacgctacagttagatttattacatgttataaaaattgaatgaaaaattaagagagagtaaaaaagagaaagaaacgagtgtggtgaatgaacaggggaaaatcaggtagaataagaaataggaagggggaagaaaaaaatggtaaacaaccacttgggaatgtttacaaatcagatttttttaatctgaagaattcttgtctataagtagatatatatacctatgtagaaatacatatatcacacataggcaaaaatgaaacaaaccaaataattctaagatacaatataaggaaataggatttttaaaaaaagaataacgggaggacaatcaaaggacttcagagaatatgagattgaagctaaggctggaaatatgaagatagctatggaaggtcaggggaaaaggctgagatgaaaaggtacagggagaaggaaaataactggaaagactagaagaggcagaagcttagcattttgaagaactgaagaaagaccagtatgactgaatctcaagaaacaaggagagaaggtgactagtgctgatgtaggaggtagccctgtgctaaattatgctgggccttgtaggtcatggtaaaaaaaaaaacacaaggtccttataaagtgtaaacagaagtgacacaatcaagtctatttttaagatcactctgagggattgagaataaattggaaggcagacaggagtggaagcagtaaaaacattccatatgaatcattcccaaatgactgagttcccatctatttctttcctctcccattcctacttcatatcccagtcatttagccccctcccgcacctttgccccagatttcagcaaacaacgaagaattaggaaaaggaaaaatgcagcttttttgacgctgtgtacattgggtattttattagaaactttcatgttactgctacgtaaacactgcttcgaaataatacataagttaaaaacttgtcaagcaagttcttcatcagctgtactcctagaattaaacacacatcacatacatacaagtcaacaacccccacaaaatgtttaatttaactgaccttaaaatttggagaaaagtatcggttggctttgtctttatttgctttgtcaagatcattttttgttaaagtaagtactagatattccttgtcattatctgcacgctctatactgcaaatgctatcgatttcttgatcacatagacttccattttctactttttctgaggtttcctctggtcctggtatgaagaatgtatttacccaaaagtgaaacattttgtcctaaaaaaaaaaaaaaagaaaagaaaaagaaatgaaatgacatatttaattaatgatgttttatttttttaaaaaagaaaatctgtcacctatgttaaacatttgcaaaaagtcaacaaaataaactatcatttgatattctgaataaaggtaaacacaaagactattataaggcaatctgagttatctgttgcattttcattcacatgatttttcttcactcaaattctcaaattttaaaccaaaaatacaatctcacaagatctaagataaactacttttgccttaaaattttaagtaaaaaaacctcttttctcatctaatactagctttaaatacgtttttagtttacgtgtacatacatataaacaaaattcagatatggatttaattttttctacatttcaaatgagctacctattccaagatttactttaacaaaagttcttggacggtgagtgcaacttccctgatgacgcatggcaaatacatgtttacttctacagcaatacaaacatgagaagctccagtttcttacatgacaatataatgcttgaatactttcagaataaatatgagggggtaggaaagagtactactgatttcttttgatgttataaaatgcttgttcttaaaaaaaatcacttcttactaataagataataccttcttaataaaaaaacacaacagaagttcatcactttaaacctctattgaccaacaaagaaatctggcctgtataaatcatttggcaattaatgatatacagccttgtgacatcttatctggtacct

SEQ ID NO: 953 - DNA, 91164 bp, Homo sapiens
tgtaaaataatttgggatgggaagcgaagcttaccttattcaattgaagagttcaggggaactcaaagttgtcagaatgcaattatccctgctgaaatttggtcaggccaacatctgacacttccaaggaatgctgaaggcttttttaatgaacatgaggcttccagattggatttcacctcaattcaaggcataaaacctgcactctgagaatatagagttcagagatgttaattagttcactactgtcaggttcacaattgcccttctagggatcaatagatttaatgccttcatttcacagaagaaaactgagatctggaaaacatcatgcaataaagaaatgagttagtaactttgcttttgtgcactcttttatgttcctaaatccatgggttcctcaattcaattcaattcaacaactacttattggttcctggtttgcaacaggccccttgctgaagtcttggtacagagatgaaggatacctggtttctgctttctgacaattgctactctgggtggagggattgatatggacattagtaatttttcagaaggcagaatgtataatgagctaaagaacacttacagggcgattggaatatgccagaaggaaagagtccctctctggaggaaactgggagagatccctgggggaggtctgtctttatgtgtttccagaaccccaccatagcttccttctgggtttgtcctcttggtcagggtctctgctctgccatttctgagacctaaatcttagtcaaaatttaagataagtctcaaattcattctttcaaaatttgctgaattttggcttggcagtaggggtggatccaggttttgtgagagctgaagtatatacaatttggggggagcctctttaagaaaagaatacactgttacagatacaactgtaggtccaaacacaaatctcgcaaatatttatttagaataagaaaagaggccaaacgtggtggctcacacctgtaatcctaacaattttggagcctagtcgggaggatcacttgagcctaggagttcgagattagcctgggcaacatggtgagacccccatctctacaaaaaataaaaaaaaaaaaaaaaaacacaattagccaggtgttgtggtgtgttccaatagacccagatacttgggaggctgaggtgggaggatcacttgagccttgggaggttgaagctgcagtgagccatgatcttgccactgcactctaacctgggtgacagagctagaccaagtctcaaaaagaaaaaaaaaaaagacaagaaaagaaatcacaaaaaattgttgtagacttagaggttacgtctctttcttcttcagtctctttgtcaatctgcaagaaaggcttacatagaaatacttcctgaatgctccctggcttctaaccctccaccccaccctcaatactctgcagctcctggacactcctatctcttcaggagtctgtgcaagtgagatgtttcattagcttcacggtaaagctgcctttgcttgggcagatgactggctcaatgtcacatagtcagtaaagtcgtcaagccaggactgaaactagggtcgttttagagaaacgagtatgcattttggatcacatagacctggatccaatcctagcccaggcactaactacctgtgtgactttatgaaaatcatttctcagtttcactttctttctctcttatatagggatgataataataagctcacaggccaggtgcggtggttcacgcctgtaatcccaacactttgggaggccaagctaggtggatcacctgaggctaggagtttgagaccagcctggccaatatggcaaaaccccgtgtctactaaaaatacaaaaattagtcgggcgtggtggttggtgcctgtaatcccagctactcaggaggctgagggaggagaatcacttgaacctgggaggcgaaggctgcaatgagccgagatcgtgcctttgcactccagcctgtgcaacaagagcgaaactccatctaaaataaaataaaataaaataaaataaaataaaataaaataaaataaaataaaataataaaataaaaggctcacagggctgcaaagtacctgaattgcctaccaccactcctgacttgaaatagtgctcaagaaattgttaactgtcacaaagattacttcttttccccagtaagcatctcttcttccttgataatagaattaacgtactaggcacatgcatgtcaagttcacatttcccaccctatgtaggagctagatttggccttatgactaagttttgggcaacaatgtataagcaagagcaatttgtccaacttctgagaagtgtccttaaagtaatagggtgcatccttcccaaccagtcttctttcctgatagtgaagaagcagcagtcatgttataccatgagacgacatgcagaataaaactacatacagcagaagatagacagaagacagaaagagcttgggtctctgacactatagaacatcatatggctccagacctacttgtaatttacatggaagtcaaatttctaacacatttaatccactgttagtttagatctggaaggacttgtaaccaaaactagttctaaaattttttaaatcacatgctttttttcactttgctgttctgtttccagtttgtaatgtttttgcctgtgttaaccttgccaggtgtaactggaaatttaaaggatatcgagtccttaaactgaaatgccataacttgaaaaagccaatggtgagattttagccttctggcagaccgaggagggctgcttgtttggaaggggcatttcatccaactccactggcagtcataggcaagatgacctggtttcatcatgattatcagcagcagcagtggcatcactattgcagtgagagtggttaccatttataggatgctatctgcctagcaataaaatatctaattaacacattaagtcctcacaaaactccacacagcaggtgtgattatccctattttacagataaggaaagtgagactcagagatgtcaaattatttgtctgaagaaaccaagtgacttgttaatggcagagcttacctgaatccaaatctcagtccaaaccccaatcccttcataatggcaccttactttctccgtgagcacaaaacaagacctggtaagaatgagcctgtacagaattaatgtggtcacaaatgtctagtaaatcagttcagaaacttttattacatcattgtaacacgttaacaagcactgtaacaaaacttagtggcttactcaacaaccatattatagctgatgaataagaattctggcaggtcttggctaggcaattctttcatttcacatggcactgactggagtcacttagtgaccttcagctggtggctggtctggtctggagtgtccaagtgagttgtactcacatgcccagcatctcagcagggcaaagtggaaggctgggctcagttgggcctttcactctctccatgtaatctcatcactgcttcacattgcatctccagcagggtagttggactttttacatggtggtccagggctccaagagcaggcattccatgacacaggaagagtaagtgaagagtctcctaaggcttggaaccaggaaactagaagtgtaacttttgccttattctattggtcaaagcagtcactgagcccacccgaaagcaggggaggagcagatacaaccccatttcttgatgaaagaactatcaaagaatttgcagtcaactgcaatccctcccaatactaaacttgttgaaggaagtttcacagaaattggaaggcagataattgggccatttgaaatctgtatttgtttgctgtagctgccaaaacaaaaagccacacacttgatgtcaataacagaaactcactttctcacagttctggagactggaagtccaagatcaaggtgccaaccaggttgattttttctgaggcctctcttcttggcttgcagatggatgtcctcttgctgtgtcctcacatggtctttcctctgtgcgtgtgcatccctggtgtctctctcttcttctacttttttttttttgagacagagttttactctcgttgcccaggctggagtacaatggcacaatctcggctcaccgcaacctcaagcaattctcctgcctcagcctcccaagtagctgggattacaggcatgtgccaccacgcccagctaattttgtatttttagtagagatggagtttctccatgttggtcaggctggtctcgaactcccgacctcaggtgatccgcccgcctcggcatcccaaagtgctgggattacaggcgtgagccactgtgcctggccagtttctctcttcttataaaaaaattaggtatattggattggagccccaccctaatgcctcattttaagttaatcacctctttaaagacccagctcccaatacggttactttctgaggtactggaggttgagacttcaatatattaattcagagaggacacaattcaacccacaacaaatgtcaaatctaaggccactatataagtggaaaaactgaggcccagagaaagaaaatggtttgccagcgtcagacgatccagcttgtaacacagtcagcatcaatgctctttccctcccagcccccttccaacacatcagatgattccaagagatgtcctgtcttacaggaggtaggaaatagagtacagagacagggaacaccaagaaaggcccagcattagggccagagattcctctttttctcttgaaatttcaggcttctcccaattgtctttattccaagtcactgggttcataggcttctcaacaggcccagatctctggactgcccattccttttcccatttcttggctgacatttctggcattcaggtcactatttagattctgaatcacagtaatattggagaatatgatgtccttgtttctgccttaacatagatctgtcaagactttgggaacatctccacagtgatctgcacactcaggcccattctgggactttgagtcatcgcattagtgccccctaatttgcagtgtataccccatcttcgatttgctgcttgtagatttcaagaataacctgcatcttagaagcgaattggcctaggttctgtcgaggcctcttcaaggatgcatctgctaccttctaggatggaggtgggggaaaaggaggctccagaagtggtttaagcctccccagaacatacggcaattggtgatcaccattgttcttcagtctctccttgcattgcaatctatgctgctgtgctggataaagttagaaaacaagtcttcccagagataaacagaagcagtttgattctaattcatataggaaaattatattaagtttctattacatagcagtcaaagtattgggagagagggaagcagtatagttaagtgagactggcttgtcccaatactgtaacacaagcaaactgcaacaaaagcaaaaatgtatgtattcagaaaggaagaaagcaagaggggtaaatatggtccagtgcttaaaagcatgaactttagatctgaaaatcctgaattttaattcctcctctactacttacaagcagtgtgactatggaaaagttgcttaacccacctaaagttagttaaccaactttcctacattttggggaagtttgggtcaactacctaaagcagtggacatagagcaactcccctcaaaggctgtccaagtaaaaagacacagagctgaatatcaattttgacagaggaccagagtagtgagctaactcatggaataattgacattttccacatagctcactggtgaattttcagtttcccgaaagcatatatgctccagtaccatacacgtaaaatctgtatgattatcaactctatgagctttatattcccctgctgtaaaattatggggtagcccaggatggtcggcaagtcctttcatctctgagattcagggatcaaatgaagatgttgaggtctcatatgcgaagtcatggacagtgcttttctaccaactgaaaagagaatcagccctggcacagtggctcatgcctgtaatcccagcagtttgagaggctgaggcaggctgatcatttgagtgccagagttcaagaccagactgggcaacacggcgaaaccctgtctctacaaaaaatgtaaaaatgatccgggtgtagtggcatgcacctgtgttcccagctactcgggaggttgaggtgggagaattgttggagctcaggaagcagaggttgcagtgagccaagatcgagccactgaactttagcctgggtgacacagcaagaccctgtctctaaaaataaataaataaaataaaaagagaatgttttccaggattgatgaagaggaaaaagtaatttagagggaaaaccctgcatattataactatttacatttctttgctgaattgatggacaaaatgccattttgggatgaagaggaagcagagatgtgatgtgttacagaagcagaacccttgagcttggggaatgttggtaaagttcaccatatgccttgagtgcagggcttctataggattaataaatgcctgtttgaaaatgttctcaatgaaaaacgacataagatcccctctgcctcctcattttctctctctcacttatttcctgatcccaatctagtgtttacccctccttttgcgagtagtggagttctgccagtaggaacactgctaactgagggcctttagaaaagctagagccattcttctggccttcattccttgccagaatccttctactcttgtttccataaggcactcttgtctcatcctattacttccactacttttagaatgatatcacctcagtgaggtaccatcttttctctccttacaaaagaaaacagacctagtttccttaacctttcagcagaagcaaattccccaaatccctctgtcattctggttgccttctgctgtgctttctctagttccaaaatatcctatttatagaaagaaacccagaatgagctcaggactcagaatatgacctaaccaatcctctttacatgactagaataattttccctgacttttccattgtgcaatgtgcccaatatattccaaatggattctcttttcttttactccaataggtacaaaatgataaatgttcaaactatagccaatgttactgataataagaggttgatgtccactgtgcttaagaactttctagaattaatgggttcaggagcaaattagagtctgtggtttgtgtaacattagagttaaaggaacaggtcttttccttgaattattttttgttatatagcattcacttcagttactaatgaagtgtattaatgaagccataatgcaaatgaaaccataggctggggcagcaagctttagtattttgctgtgcaaaatgtggcacaacttcatatcacctgggaatctgttgaaaatgccaactgttgatgctgtccccagacttagaatctgctttctaaagagttgcccaggagattcatgtgcacattaaattataagaagcacagtttagcatctgtgaaagtttccttccagatgttctaggcagattagatgtcaagcacaccttggtaggccctatcatgatataaaattggctctttttactaattttcacttgcctttccatgatcctaagttttgtgactccttggagtttttatttctcattttatccaattcctaatatgaacttacatttagttaagtacatcttgcaagtcctgacctgacatgctcttgacccatcttaatctccctgtcaacttttcatattaacaatgtcacttctctcttacttgctacccatacttcctcttattcatctcttttctgtaagatggtttagaaagagtcattcagttcttcctcagtattccatgtggtcttgcttcagcctcattatagggttgtctggtgttctgaaattgagttaagtcatgtccagatcttctgtctcatgcttgcttgtcaggctcagaaatgcacagaggttattgcaaactaaatcatgactttcccaaggctttctcttgcttacttctttttgaagttttgattgtttcctttataactaggtttggtagattgaggattctttgagttctttttaaatatgagctcaataccaggttcttggcaatcattgcctattcttgctttcagaaggctttccaaattgtgtgtcgtgattctttgcctctccttctattacctgtggagaaccattagagatcaggaagtgactaagagagccaatctttcttcctacctggtcagaagctcttcttatatcataaacagaaggcttttgctacctgttttttgttttttaggctccaagatagcaattatatcaccatcaggagcttctctgtgactactcttctgcattgattgtaacaagtgatcctgaggtaatgaaggggaaggcactgttgacctctcagctattattaaccaagcactctttaacttctgagatactttaggtagagaattgttaacatgtggatcaccagtcccatcagagtccctggcacagaataagtactgaaaaggaaggagaagtaagagtgggaaggaaggatggaaataatctatccaactccaggtgagatggagagcctggaaattaactacaaccaaatagatttggaaagacaagttgggagaaaagaatggaagtactatctcatctttgtcttccttgatatatagtaaggaatacacaaaccatcctattaaaagtgacttactgaatttccttttagaaataaagacagtggactttgtcttaagaggtactccaattatttcttagttttctaagaaaaaggagttctctttcatttctgactttgtagactcctgctttgttacccatctcccaccaattccaagactacacatctactgagtgaagtttttgtgcctcctaatactgatgagcctcgtattaatttttgaacctatcttcataaagatgtgggcaaagaacaagctttataactgtggcataggtagaaaactgtgaatattaaacagctcatctataaggagtgcaatacccatattttgaaagcaaaaatccttccttctaggttgtattaatacattttgctttaagtttggtcatgttgttaggtagtgatccttaaggaataagatttgttcactattcagtctgaaatgttcttgccattactaaatataaatggggtcaaatgagccagagaagtgtgatattcatatcacagctgattggggttgtatgaaaaaataagataaccccaggaataagtgctactgagatgaaaattgtgacacatacagtgcttggcatctatcttaacaaatgaaattatggcaatctttacttacattagacactggatttctgcagatggaaaaaaattatgtaagtgagtggatggagataaaaggttggagagttgatagtgcaccaagagaagagaattgtctatcagatcactgagaaatccaaagtgggaataggtatatatagatatatggcaaacaccatatcttcaccactctccctagctccctatatcaacccttattatttagcaactcttgtccatcattttggtccctgagttggaggttttagtaatggttccaagaaataagagcactggttaaacatatttcttgggaaatatcttcagtacaatcatgtgtctaaatgatttcaaactaatcagtcattcatgttctgaatcctcaggcacctacaccaacaattcagggtatcccactgtaagatataattttcagaataaagatccagcagaggagtagctgatagtttctatacagaccacaaactgttgacaaaagagtcagaaaaatatatcacattgatggcaatggggaataatatgttcatatacagtggtcatctccttatgtcttttcaagattgcagatctgtgctagtcattgaatttgtcagtaggcaaggaaagttattaacagcattatggattccattctcaaaaaaccagttttgtccacaaagcctgtaccccaagacctctgagaatggtatgtaccagctgtcccagtcttagggcagcatctgctggctaattcatggatggacaaaaagtggcagtttgtgggcaatttgagcagtcctttcatttggcgagaactgttgtgttgatgactgtgagggtttctgaaatcctttcataaggacccatctcaggtctccaggagcctggcaaatctagaactactcctaatgagaaccaggaagcttttgtatacagatattttatctggagcctaagataagcctgtttgactttggaaacatttctagagaagcatgaactcaacactagacttactgctaataataataacccagtaccaatgggggctgcaatgaacagaggtccatgcacataattgggaagtaaaacttattttccataaggaaggcatttctgggatgggagagggaggaccttgaagcagccactgaatgcttatgttctgttgcttctaatcatcctatcgtgtaagtaagatttttctacataagcaagcaagaatgatattcaaacaaagcacttttgactggaataaagaaactggaaattggaaagggctgggtggtctgaaacttaagagctatccaccatcttctgcagcatcgctgtgcctcatccctgcagtcaatagcgccacggccagggcctgtgacgccgttggtgggctccccttggtgggaactcagagcgagtaaaatcatggtgtcagtgccaaaacgacgaaacctgaaatgcgtctggggacttcccagggcactagcgctcctcagagcgacggacatctccataacaactggtctacattcatccctggttcttctgctctgctgtgctagcgatggctgagggtaggcaaagggcagcttcagtggaaagataccttgcgttagcgcctccctaggctgggggacgttgccaaagctcgagttattgcctatttcccgagatttccggagtcgtccccacatctcccgcggagagcggcgcccctccgccccccctcccgcctccccctctattagacactccaagggggtagtttgtttcattgtgctttttttcctcttctcaaagttcatcctttcgcctccaagttactttccgccaacacgtgacctcttcgcttcccagcttgcgcagccactggtggggaagcgcgggcgctaaccgcagggcttcctgggagagccccctccgaggttcgccaccccagccctggctcccgccgcgctcaccccggcaccccggcggcggggcagcccccgcaggatgaggaagcggctccggggaagcagcaccgagcagcagcggagcgcccaacctgccgcctcccctcccgtccctgccttggcccgcggctccgctctccgcggctcgccttccgacctagctgcgcaccggggctgttaactcacatttgggaagccataacccattagagcaaacgcagtcataacttcattcaactcagccgctcgagagctcggcttacacaggttcctgtgggcaactagtggctcgccttggtgcctctcgcctagtcatcagtacctaagaggaaaagggaaagttgttgggctggttcgcgcttcgacgcatgcagatgttcccaaggacaagtcacttactcgcccccctccccccagtccccatttgatcatcactcacgacctcatcggctggagacccttagtcatgatgggggagggggaggggcacgaacttttctaagaagtttcctttttttacccagagagtcacagtgagtcggtcacgtaaacagcgaggttagtcgtcgccgttgccgccccccaccccctccctgctgcgcttttctggtattattattaaagcggtagtctgccggcgctgataagcaacaagttccccagcggtcttcccgccctagcctgacaaggcgaaggttttcttacctggcgacagggaaatctcccgagccgaattcagcttcgccggagccccaggtgtgacctgcgtagtgggcaagggagcggtgtgcaggctgagtttttttttttacaggggtaccctgaaactcctcactttctctgggaactttcagtgccaggacccagtaacgggcggttagaaggcagccctaggaaacacctgctacatagcagggcagttgggcaatcattggtaacctcgctcattcattagaatcacgtaagaactcaaaaggaaacgtgtctctcggagtgagggcgtttgcgtaaatctataggtttttcgacatcgatgccagttgctttgtcttctgtagtcgccaaggtggttgagagtttaagcttgcggatattgcaaagggttattagattcataagtcacaccaagtggtgggcgatccactgagcaaagccgaacttctcacatgatgacttcaaacaagacacattaccttccagcatctgttggggagacgagattttaagacacttgagtctccaggacagcaaaggcacaatggtgagtagcaataaaacctgcattataattgaaaaatcttgacatgttgcttaacaacgggcatatcacggctcttcctagcacttcacacgccaaagaacagcagctactcaggccaggggaatcgggtttttacacagtgcaactttaattggaatcatttgagatttgacacagctatgtggaactgcgtggaacaaacttggagctgggtgggggggtgtgtgttatattggttgttcaaggctgatgcttgtctctcagcagtcttgcattctattcttttccttaatgtgtatggtgtatgatcatattctatgatttatatgtgggcatgtaattgacatttgcaagggggttaatttccatctaaaaacaataatgctgttagaggttggggttagggggtggagtgggggtaagggtggggtaaagactgggagtttaggtgtagatggggggtggggttggggggagagaaataagtcagaagtgcatatcaccggtaatgggtaatcctctcgtagaagaaaaggttctcatcaacatgtgatcaactattaacaggatggctttggcaaagccatccgcacgtgacaaaccgtaaggaagtggaagaaaccgtctagagcaatatcaagtatcacttaattagagatttttaagccttttcctcctgctgtgccgggtgtgtaatccgggcgataggagtccattcagcaccttggacagagccaacggatttgtccgaggtggcggtacccccaggtagtcttcttggccccgctgtaaagccaaccctgtgtcgcccttaaaaagcgtcttttctgaggttcggctcacactgagatcggggctggagagagagtcagattttggagcggagcgtttggaaagcgagccccagtttggtcccctcattgagctcgctgaagttggcttcctagcggtgtaggctggaatagactcttggcaagctccgggttggtatactgggttaactttgggaaatgcaagtgtttatctccaggatctagccaccggggtggtgtaagccgcaaagaaggtaagcaccagggcggggaccccttgcatccccaattcttgagctattttgatactgtcttccggagaggacgcgtggtggaggggaggaggtagagggagagcatgagagggggttgtttcttggtatttgcccagtttgaattgccctaggtgagaaccctggggcaaagggagaaagaaaaaaaagaaactcagtcttcctgcggatataatgagtttagttaacttggacctgcaaatgtctgattcaaatgtaagatttatctctctttttctcctcttcacctccctcttttccgttctctttgctggtgtgtgtgtgtgtgtgtacagtagattcattactaattatgaagcttttgcaaaacattcgaattcctaaaatttgactttgtagcatttagaatcaggcggtggaggtggtgtgcggtggggagaggaggtggaggttgggaagagggaaggaggtaaagctaaacctccaacacaaaaaaatgaatcaaggtaatttcagctcttctagtgagaaggattcattctctctgtatccctccctccctctctttccccctccctccctccttcccgccccccttcttccaccccgccccctcctccagcctccatccctccctcattctatctcttcctctccgtcgccctcgctcctcgctggatgcttctttctgggttttcttttttttttcccttctgtcctccctccccgcgagtttcgggcgctggcttagagggttcccgctttctcaagggaaggggagctgccgagaccgcgctccgctccccagccgggccggatgcctcactgagcccaggtccgagtcagtcggggtaactcagggaaaggggagcctccgcctgggagtagaaggtcctttccggaccgaagagccagagagcgggccgggcgagggggcctgggcggctggaggcggtggagaagaacacttttagctccgtgcggcggctggacagagccaccaatcagctggacgcgcagaccgccctgccagggcgaggttgcgtccggaggcgccggtggagggcggccggctagtcgctgagccgccgccgccacccgggtgggcaggggactggcggtgggtggaggtgaggggcttggcgggtgagatagaagcggcgcggagccgcccagacctgtgttctacctctcccgcccccgcctgcacccccgggggacagcgaactgccggaacgcgcggctgcgttatcctcttgccactcttcagggagctcagggacttaggcgcccctgggcgggggccaccaggctctccacactcctataaccctcacccccacccccttctcaggccttttgttccggccacagagccaagcccggtggcagttttcgccccagggtttggtcgttctggactcctcccccgatcagctcttcttaattaaaaggcaagagcttggggtaggggtgaggggaacgtaggaaaaatctgtttccgaaactcaagaccactgttttaacgaacgaaagaaagaatcccaactctgcgcaggtggattcataggcgaagcgaggatattgtggaaattcagaaggaaaagataaaaaacaggcgctaggatcagatgacggtgataggctgctcggcacacaaagggagcgtagggcagggtttacggagcaagcctgcagcgaatggggcacagattgttccgagatccagtcgttttctcagtcagatctacgcgaagggaggggaggggaggggcgggcaggggagcgtggcgggaggggctgagcttgggggcggggggatttctgatcagtctgatgcaattccaagcgtgctgcaaaggaactccaaggcgcccgcatcaccatcgccacccacccttcccagatggtgctgttttaaatacggatctgcagggctgaacgcagaactgggagatttattgcaaaatcccgggaggggcgggggggggtggtgtgcggaacggggaatggaggagcagaatttaaaggtgcaacgcttgctttttccaatcaggcggcaaccggccggaattattatttttttctttctgtctgcttgtctctggattctaattcaccaagaaagaggtgtaaatattgtgacattttgaggcagcttgatggatgggaaagaaatcatctgtcactctaaattgcagagttccctctccccgcgccatcccttgctagcgaatactcgctgctgcctaatacagttgctagggcttcaaatgaatgcatcgttaagggaatattatccttttagttgacttgccaatttagttgacagttgaatcgagaaaattgtagatttcgtgtctctgggaggaaaaatgcttaacagtctaagtcttgtaaccttgaggtctttaacaacttaaataaacctcaaaagtgtcacgtcatcctctacacacacacacacacacacacacacacacactcaacttgtaagatgacatggtttcacctaaactgttgtggaaatgaatagcactttaaaaatggtgcacctgatattcactgtttatgtgtatttacaaagagctcttcagcatgaaggcaagacatttcaattgtcctgtttggaatcagtcagaagactagaaggtgatggagagaagaagggaagaaagaggaaagagagagaattttaacctagatgctattaaattaacagtaacctagcctacttttataccccttggtcttgcatattaatatttctgtatgtgagattttagcttggtctagctcccccaatggagtataccagtattgattcagatgagaatatgagcatcctgccagtagctttttcagtgtcattgatagtaagacctacaacacagcaatttttggaggatagaagagaatatatataagggctttgcaaactgggaagcaggcactccataaatgggaggtatcattatgacattctctttgcacatatcattttcatttcactgaaccagagtactagttattttaaaacataatctaatgtatatgctcaaggtagtaagtggggattttaaaagcaagtgattagttggcttataaaatattatttttcaattgtctattaatgtacattggaaagaaggcttttaaagatctaaaatcaacataaataagcttcccctttcatttgccagactctttccctatcagatttctgatctaaattcttaataagaagagaagctggtgaatttagtttctttccttttcctggcctgtcctctaggggaagctttagtaagaaacaacattccaaaatcaggcagtgagcgagagagaaggcaagggactggatgaccacaaaatagataatcagccaagaaacagaaatgagggaaaaccagcattaaagcatgacttacaaagggtttttattttgtaattctgtaattttgggaccaggctcaaacttgctcaagtaacattcactcgatcatattgcttacaatctgtcagttaaaatgatgtctaactgagcatattttttattaaatatacttctctcaaaggccagtaaagctactctttggttttaattagacaaactagtctaaccacttaaataactctaatgaatatgaactgatatcatcagatttaaaagctctgctgaaaactaaatttattctgaaaagcactgacttgccagaaaaatatctatttttgcagctttcttttcactctatggataatttaatgagttgcttattttaattttacaactgctacctcagaagtatctcaaattatctttctttggctggtgtctttctctgctgatctgctactgctgtgtgtgtgtgtgtgtgtgtgtgtgtgtctgtgtgtgtgtgtgtatgggcgtgtgtgtctctgtgtgtgttttctagtgggaatttaacaagcagtgagtctcttaaatttacatgccataatctatgtcaagaacattgcgtactacttagcaataaaaataaacattagcatctagtgaaagcttaccatcattgagtgctatggaaatagaggtcttaaagaaagattaaatttttcaacaaaaaaatttttcccctttttggcttaaaggtgattataatttcaaaaatatgacatctttcctcttttactttggaatgtagagctgctgctttaacaagtgtcttttgagaaagatacacgtgtttcataaagattaatacccttaaaacactatggtgcagagagggaaggatgaattctttaaccctgcctctaatctcatttggcaatttttggagtattcattctgactttttaaaaattcaggtggattttttttctgctttctttccaacattataaaacaatcctataagagatttttctgctatagtgcagactttatttgtatttcctagtaataacactttagattcatatagtactttgacagctctctataggtttcatttgatttccttatcagtcatgtaaggtaggaatcaccaatcaccttttacagatgaggaaagtaaggtgcagaattatctaacactacactgccagtaagatgtaaagactaactcagagtctttcttcaaattttaaggaaatttgtgtttgttcctctctagaccatgctgccttaaactccactagggcatcagagggagctgtaggcattattttctcctattttgatttatttaattaaattaaaaacattttttacaaatagttttcaaaatttcaggcctaatggaaagttttaactagtcttcctaagacagtatttccctctcccacagttagacactcaaagaaagcaggactcttcctctagttgacataccatctaagtcatagttgctaattccccaaaaaacaaatacaaagaataagaagaaccaaagccaagatgtacattacctttacttgtgaatcatagaatctgggttctgggaaggttctcagaggtcacttagcccagctcatatctgatacatgaattcatgctggcttgttttgtttcaatcctctggaatttcatcccagtcttggacactgggtacttgtttatcttggtagatgttctgatacttatgtggatcatgagcttggctgatcatttcccattttgcccaaaaggtatactttctatagagactctagcattcataattttattttgtaagtattaattggcaacacataatttgccattatgtgccaggaactgtattacaatctggagattcaagaacaagcaagaccaaatggtccctatcttggtggatcttgtggcctagagacaaagactggtctctttatttgctccaatccttagaaggggacagacctctggactcataagattccttttttcaagagaacacagtgaataagattaaaagcctgagtttaggctttacttccaaccgcttgtcagtacccaaaaaagtcaatcagtcactcttgatctctgcttcctcacacataaaacaaaagagatgttctcagaataaactctaaattccacttccgttccaagtttgagtgatataaaagatatagtctataactatttcttgcagtgtaggggaaattaaggcctaagttaccctaacctttggtgatttacaattctgggtgggtaccgcaaatttttaacttgttaagaagtatatcatgaaaaaaatcaaagtaacatatttgaacccagaatagaaggaatctaggtgttgaacctgttcatttatggaatgatggctaggaaagttttaatttagagaatgatctcaaatttctgcggattatttttaaaagcaggtggtgcgatggaagacctgctatcaaatttactgcttattttctttgtgcaagcagaagttataatttttcaggtcatttccttttaaaatcaaaaatattacatcctgaaattgcctgggtctcatgaataatgcattatatacacatgataatagataattagatggacaagccaaaagaaacatgaaaggaagcaggtagcccaaggattgcagaaggtgtgtgggcattttgacatccaggaaatgctatagatctgtccttaactaactcagcctggtggagataattaagaaaaaaaatgtgggtgtagaaagactgcaagccattccctgggattggctagattgctgcagtagttcaaaaacaattggcacagccacccacactagacatgattgccctttgatgaggcagctattgacttttataaagatgtcatatttaaaataacttctgatgcactaggcataacagacatcattcttgaattctattttagacaaatggcaaaatgtattacaaagtattaatttaaaaataaaaaatctttaaagtctagtgtctaaaaaccagcagtttagtaacatgcaacctctggatttaagaattcagcctgaagctgggagaaagctgtagcttgtataggacattttgatccactctgggcatttcccagaccactacaggaagtaaaatgtactttgtcaaagtttttaacctttgagtgaatgttaaatccactccaaaatcttcgcaacctgggaaaggtgatccaacaattttcctaaatagcggcagaaaatgctctgagatctttgttcccagagtgaatgttataatgttatgctatctagaaatttccttgtagcaccatgctcatcagtaccaaaaggagttagaattgattcctcccgcttcaaggaaatatatcaaccacctcctgtctctaagtaacaaggttactgtggggaaaaaatacacaaattaggtgattgcagaaaggtgtcacaaacatccaaagcctttgggatagggcattgcagtgtgagtgaatagagaaaagaaagagaatgtgggaaaaaattgagaaataaaaagggaagtcacagtggagttctaattatacaggggctcttgaattgactgttctctaccttccatgctcattgttgttctggctactttagtaggaaacaatgatttcttctgctttcaccttcctcctccgctaaggacttcttacttgccaataacttccataatcaatgtttaagaattgctctgatgcccagtgtggtggctaacgcctgtaatcccaacactttgggaggccgaggtgagtggatcacttgaggtcaggagttccagaccagcctggccaacatggcaaaaccctgtctctactaaaaatacaaaaaattagtggttcatgcctgtaatctcagctacttgggaggctgaggtaggagactaacttgaaccatggagacagaggctgtagtaagccgagatcatgccattgcactccagcctggcaaaaaaaaaaaaaaaaaaaagaaagaaagaaagaaagaattgctcactgtaatgactttcatgccatggactcaactctcttggcagtctggtaaagcttatgtaaacccttctcataaaaatgtctaaatggggccaggcgcgacggctcacacctgtaatctcagcactttgggaggccaaggcgggtggatcacttgaggtcaggagttccagaccagcctggccaacatggcaaaaccctgtctttaccaaaaaaaaaaaattagctgggcgtggtggcatgtacctttaatcccagctacttggaaggctgaggcacgagaatcacttgaatctgggaggtggaggttgcagtgagccgagattagccactgcactccagcctggatgacacagtgagactttgtctcaaaaaaaaaaaaaaattctaagtgaatgaaataaatgtataagattacaaaggaagccagtggcattgatgtacagttataaaaacatttaaaataatatattgtgtgatatagtaatatatatgctttttaatacattaaataagatctaacagcaaggtaaatattataattttgaaataatgataagtatcaatgtattttgaaatatctataaaactgacgtgatatgaaggtgtctgtgatgtatactggtgagaaagcatgcaagtactactgtgtaacatttcccacacatatttaacaacagaacacttgagaagcacttattaacacagcatagattcagaaatattaatttagtaaatgtcaacattagccattgttgtttccttcctggcaaaaggaaatcagcattgggagaaaacttttaaaattcacatttgccattagacaagctgtcaagtggggaaaggaccaaatactgagaaggccagggtatggtaagcatgtttctattgactgagcttgctattactctaacgtttatctttagcatcaccagcacaaccccattaccctagcaatccatcactccattgaaaaagataaaaagttcagattctggtcattaactcagcattgcttaagatacctgttctgacctcactaacccaagagattactgaaactcttcctgtttgtcattactacaccatgggaaattataatgatgtgggatgacatttactctgcattcatccagtgctgttatttgttttgtatttggcatatattacttaactcttaaagtaactctcagagatagattaagaaaactagagctcagagaatttaagtaacttgcccaaactaacacagaaaatctgaagtggagaagctaaacttcaaacccaaagttttctggttccaaagtccattatgaagttgtgcctccccatcttatagctaccacccagatttaatctgggtctcccattatcagatggtttacatacacattttcttacaagatcttgaccacaactctttgagatggccatgagtctcacaattcatttccaggagtgctactttagaatcattttgatctttgctaaccgatgagagattttcaaatagctaattgtcacctaccctttttgaagcccagttttcataatcataaaatggaaacagtattacaatgttttgttaggatcatatacattaataataaaatctaactttgttgagctcactatggtgagcattctgcatttccttagttcattgaatcctcacaacaatctttctaggctaagacgattatttttcttttaaagataaggaaactgaggcatcagtaattaattaactatcttaaattagcagagccaataagtggcaaagctgggttcaaacctaggtctgtctaatgtcaaagccctttttttaatcactaatctgcaaatcactattcaatcttagcttttattattataattatcatcacacttaaaacactatcaagatacagaatgatccagacataagtatatagtcactgaagagattagaatctgaaacttttcacctgcatgttcttccttccactttagtttattaacccaatggatgatgtctgactcctttcttaacttgtttagggcagttccaagttagttgacttctgagagttattgagtaagaaatgttataaattgtttggattaggatttagtatgtttagaagctatttcataagtttgcctttgcgaactgttactggctataatactgcagatgctgtgatgaggaacaccctctccaaagacacacagtggatgacaaacctccaaagctaacatgttgtttacagatatggagaagaagaggatggacaagcacagtctaaaacgtaattacaaggcttatagtccctgttggggactagaatgtttattggctttccttgtgcaattcaatgctcttcctccaaaggatccactccaaacttggaactttcctgaaaatagcatctcatttgggagcatgccaggaattggtgtctgggtcctttgtgtctttgcaccaactcagaactctggatactagctctagaaactaagctgggatatattctgggtaagggagtagcatatctacttgggcatcttcctgatacatttatttcatccatcttcctcctagagagcacctcctagaaagatgtggttttaaatgagggattggatgcatactggtatgtcttagcacacaagtcagtggtctttgcagagctgccaaaggcatataagtaatcaaagatgcggaagtctatgaagagacttcatcccacctccactctgatttattcagggaaggaccccatgaacacataatggatttgatacgtcccagagctctgaaagcagcctagcaaaaaaggataatcttgaaggacattttgatgtatgaaaaagtccacctaaagctttgtcagagataactaagtaatatgatggctggtagactgtaagtccttaccttggctcaggaactgtatatcatttggtaaactaaacttgtcgttcaaatttagatagaaaaagtaccttacaaatgatctagttcactgattcccttcatgcattgaaatcacctaaatcatctcttctttctgagataaggtctgaatgtgttgccagctttagcaaactcagtttgtagcccactgacctcatttgattgattgggcaactgaggtgcacagtggtagatctctcaatttattcaataaacaattatatggcccttacgatatctatctgaacaatcttgggctagtgaagttgcttgcccaggttacatggccagaaactgacagttttaaattaggaccaaagttcttttgactactatctgggccttaaaataatatcatatgacaaagatatttcttctgtttcctaatagtcacatcaaaaggaaacaatggacagtttgtgcaagattttagttactttaatgttcaaaataaaattaaaaacagattattactaaaacataagcataacaacactttaatagcattctaatcagatattattaatttcaaaatggtaggacaaaactaattatactttatacttcttaaatatcctatagttactttatgactattgagacactagctaaaacttgaaacttcaagttttcattgattcctatattattacttatttcagagttacttcatttggttcttttatctgagattggacaacagctttatttgattttcagcgacaaaattcttttcactcctgatcctccaccccaagaaaacaacagctactaatatattttccctaaagtgatcaagaaataaaagaggaattctagccaggcgcggtggctcatgcctgtaatcccagctctttgggaggctgaggcgggtggatcacctgaggtcaggagttcgagaccagcctggccaacatggtgaaactccgtctctactaaaacttaaaaaatgagccaagtgtggtggcgcatgcctgtaatcccagctacttgggaggctgaggcaggagaattgcttgaacccaggaggcagaggttgcagtgagccaagattgcgccattgcactccagtctgggtgacagagtgagactctgtatcaaaaaaaaaaaaaaaaaaaaagaggaattctaaaattaattatatctattaatatccctactcttaaaacgttagaaaatgtttgctcatttaaaatttttatttttaaaaccaccttatattccaactaaatactctttggagcaatttctttgttcctcatataatatccatacatataattctgcttttgtgattaacttttattactactcttctaaaattgtgctcttataaacatcagttaattaagagtaaatctgatgttttataaattctttctagaaacagagagcaaaatcatataaataacaatatgaatttccaaaagtacaataataaaaaaaaattagaaaaaaattaatctaggaaatagtcaagaatatgtcaaacttgtacatacttttgagataaattggcatcatgtagattagcatgattcttctttatggaattcaacttatttttactcactttgctctaattagtttttgtgtgcggacaagatggaaggtaatggaaatttggcttgcaaagtagttctaacatgatctacatccacaatctggttataatgctataagaatattatgtgggaatagtagttcaaatcagtatttagtatgaacataaagggacaaacaatgcaaagctaacttaagttgtttacacttggaacttatttaaattaaaaaggccagtggatggtcatatgtttggctcattcttctcaaggccttcaggaaaacatgcctatgaaataaaagatcctcaatattaaacattttactgcatttgggggacacatgaaatctggtaataaaggaagtgttggtcttcatttttctaattcagcatggaaactatcttgaggaaaactgactatggtcttagtttgtgtctcagaaatatatttagtctgaatcatggcgtcgacatctgacttccaaaattggatatctagccgtatagtacctcacctcccacacacaccaccccccattcccaggtcatgactactgtccaagcagcaaaaaaagaagtaatttcccagagtacatacatggcagtgacaaccaaccaaacaaaaaacaattataggggctggaatttaaattaatggctgtactctcaccaattcattccccattccaccccatctctctgtcttcaacttttatgaaacattatatttgtcctattcttctgtatcagcatcagcctttcctatatccaactagacttataacttcttggtgcctctcactggctgactaaggtttcagaagtacctacttacagcaaacacttgcagcagtctctttttggttacaaagtccctggacaatttctcaaggcgatattatgaagaggaagtaaacattctcctctgctaccccatttctttttagagtgctaactttattctatatctggtttaatgtcttcttaggccaattggactgattttacagacaccatagaatatctcctgagtaatgggaacaatatttctgctgatcccatgatttggtctcattgggttgttaggccataatggagacatacttgatgaatttatgaagacttgattctaggtatcatgtaggttagcataattctcttttactgaattcaacttagttttattcactttattctaactggattttgtgtgcagaccaaatgaaaagaaatggttcaatttaggtgaaaggtaaagcttcaaaagtagtgtagtatttcatagaccttacctttgagagaaattatatcagtatataataagcacctgagaatatgaaagcacaaatccaatttaaatgtgaaaggtctacaacttgggattttaaatggagtacagaaaagccactgtttcttaaacaattttgttgagggggaaaacagtgaaagctaaatgttctattcaagagttgtttcttttgaaaataatgcttcatttaaaagctaaggacagaagacgtagctttgttatgaaggctcatctttttattaaacaaccactactttgtctccaagttgcaaagggaagatttgtcaatctgattgaatcttccctttagtttttcccaacagctgtgtccagataattcatgactcctgtgtttcctgagccctggataatttcacacacatgtctggtttggggctccacattttcagaaaaatatagaaatcttggaggaggtccagggtagaccaagggaaatgattaatgggttgaaagttggagtttatgaagaaaggttgtgagatctgatcttttgctacgagaaaagtctgagtggtgacttaataacataaggaggttagtaagcagctgttctccatcttcactaaggttgaatgaaatgaaataagatataaattgcaacaggaacaaaaatgcattacaagtgaggacttccaagcaccagcattgctggattctagatagctccccaaaagaaggatgtgtagtctacttccctggtctgcaatgacaggcctataaatagtgagaaagatgagataatctcttaagatcccttctggacctatcttttataggtctatctatcatatttagaaaaattatttgcctcaaacaaaaattatctgatttcctccctctcaccctatccactccttctcttttgtctaccttttgtaaaacactgctaaccgaaataactggggactgattaaccgtggtgggccctcccccgcctctaagtgccactccagctttgggagcaagtttcttgtccatcactaccaccccctggccactaggggcatgtttaccatcatctttctacacaccaaacctacggcaagggaaaataaaacaaaacaaaacttcctagacttaacaaatttgcaagtgtcaccatggattaaaatacaactcttatgtcctagaatatgagcatgtaaagggctaaaatgtattttatgcatctgcctgtatcagcccatagaatagcctcctgacagatagtagatactcagcaatctttcatcaactgaatgactgtaactatgaagtgaaaggcaactaaagttgagaaagtcaggagtttcggatgtttccaaatgattctgtatgccagactaatctaaagcctaacccattcttcacaaccatgcactattaaggatttcattctcaccatgcctgtgctatctggaggtagaaagagggccagttgcacatcctgctcaagtccttggtcaaaaagaccactaaagagtgctttgtagattcatgtatcagaatcacatgaaagtaggccaaattcttagtgtgtgtttttaaaataagactttaggaagttcacttatttttttctaaattatttttgcatattcttctttttcatttttttcatgaagaatttaaaatttggctgtagaaaatctctcactccaaacatcacacagcctaaataggtgagtctcaaaaataagctaatgttcatctttcatctgattcaatgtcctgaaaccctttggtttaaatttgttaattcttctcatggcttttctcctagcaaaaccaactaataccacagctatttattactgtcagctctaacttatgcccacaatctcacatcccttttgaccacgcttatagaactattacaacaagtaaaccaaatttattcttcattattaatttttaaatgttctcagcacaaatctggtaacttggagggctacaagttgatatttctcatatgtttgggggtttagtctcaacagtttcttaatggtttctatgccgtttttcttgatccaactaaatattattcccagatgggatcagcttttgaccctcttgttctactctcctagtcttggcccttctaaaagtttcttgctgtggttcctttcttttgtctgccactaatggctatgcctggttacataactcctgtaacaggtgttgaccaatttgaacacattttggtatggtattgagctattcttatggttcataaaaagcttagtgagaacgtaacatctcatgaatagggaaattacttctcccttaaggtttttctcaggacaggcctcatacaagaatttcaaggattgcgagtgacatagtttaacattggaccaggcctttcaaattatccaggatgagtttgaaaacacctgtgccactctgctcaacagcagagttttctgtttactaagtattttccctatgctaattacggaaagtttcaacagtttttttaggccaacttatttgatgctagactagacaacttattttttttttcttgcaaggaatactgaaggtaggagtaactaggaagcttaaataaacataaatataaaatgcttatagtgatagaattgacctcagccaattaaaattattaatagaaaaaacatgtcaatgtcaagcctactacctctgttctcacttgagtaatgaggattagtttatatttcccgacaagaatagatgggaattcaaatttcttcctgacctttgttccccctggaacattgggttaggatcatattagaacataaccaaaaagaaataaagattcagacgaattcacaattaatttttaagccccacaaaagtgaaataggtagcattattttttcaagctgtgaaactttccctcattttagtaatagagaaaatgttcagattataaacttggaaactttgctcctaacatatcaattatgccagaggccaatttttaagaagaagagaaatgcatgctctatattctcagcatcatccttgcccacaatagggaaataattttgtaaaatgtttgattttagacctccaaaattatctctatatgctacctgaattaagcaaataaaaaataatatttagaattccatgcaaggcactggtacaattttgtttatcttggcttcattgtttttgaatgtaagatgtacttttaaggcaaataagtacatgttttaagctggtcgcatacagtattggcaatgctataatcacaaatcagaaagtttggaaatgcttacaagtgttaagaggtgtgattcatcatggttatctgaattggcatctgatcttcttttctttctaaatatccctgacatttctgactcctctgtcttttcctcagtaaaactgcaccacacactggaaagcgaagatacacacatttatttatataatgtcaagggagagtaggaataagaagattggccatagacccacccaatcagagtctgggaaatgagaacactttttccttcagcagaaatgctgacgtgccaatgtgaatttagcagaaaaaagatttgccataacttctaagtgagcagccttcagaatgctagcttagattcctggcattaacttgccaggtattttttcaggaaggaaataaattacaattgagcttaaaaacctgagggtagaactcattttcaagcaaatgtgaagcatcagtttgaagttaacaaagttaaagtttggagtagggttcctccagtcctttataatgtagtacaagtattttttttaaatgtataacactagccttttaaattgtattgtgctactaaaagaaattgtgcctgcattcatcttacaacctgggaaccaacgcagagggtctgtggggtagcggtatccagcttcatgccctctgtcctttattgctttctggttagcctgcgtatttcacatacattaaatattccacaataaactctgccatctgtgctgtagggtagtttgtattggtcatgtgctctgtcaagttgacagaggtgcaaagctaaatgtgtgacactcgaagaatatgcatatatttgaataatttgactatttagtccaacaatttgcaaaggcgctctgaatgatcacacattctgataacacttccaaggaacagatagcttcacttagggggtgggggagatggaagcagggttatttctagcaggaattcttgagttcactgaagtcttgtccctggtacttcactgtgtgaacgtgggtaaattatttcctggcagaggatcggattcttcttttataaaacgggtaaataatttctgtcactagtctttagaagttctaaaatagctaatgttagtgaattcattttgctaactgtaaacccttaggtaaattgaactgagtatgtaataatattatatattcagttcaacagcacattcttggtaaccacaagagggtccaggaaaggaaactgtttataaatctttccctttagcaaaattaatgttggagtctttagggaaattcttacagcaatagtcttcgcaattattaggtcaaacccctttgagattacagaaaaacgcacacacacagaaagctgcctgcagaatttgggtgtgggcttggtgggagattcctctgatacccagtgttgtacccccaagagagtgtttctcaaagtgtgacttcagattgtctgcattcgaattgcttgtggtatttattaaaattataactcctgggccctgccccacccctactaaatcacaatttcaggaggagggaccttcattttaacactcacccaggtgatttttatgctccgaggaggtccagggactccaagttaagtacggtactgctgtcttattctttattctaaattttaaggtctgcacaaattggttgaactaatgagaagaaaattcagctttaaagcagaaacacaggtagacggttgacagagttcatcaaatggataattgaaaatgtcctctggaccctagccatataagttctcttcaagggtcttggctacaggcaaatgagaacccgaaaggctatttgctcttttgctgcgggcagtggtgggggtggagggcgggggaggattaactgagccagttctgcccccaccctcgaatcacctacccccactctggttaaagcagaagactttttatttatcttggctgccctggttcgttattaaaagggttagcttatacgtgtgtttgctggggctggaagtgaaaacatctgcaaaagcatgcaatgccctggaacggaactcttctaataaaagatgtatcattttaaatgcgctgaattttgattctggtaattcgtgcactagagtgtctatttcgaggcagcggaggtatcatatgacagcgcacgtcaaggcaccgtggagccctctcgtggactcccacccactttcccattcaccgcggagagggctgctctcgctgccgctccccccggcgaactagcatgaaatctccctgcctctgccgagatcaaatggagcttctcgctgatggggtgcgagtattacctccgccatgcaatttccactatcaataatttaacttctttgctgcagaacagaaggagtacataccgggcaccaaagactcgcgccccctcccccctttaattaagcgaagggaacgtgaaaaaataatagagtgtgggagttttggggccgaagtctttcccggagcagctgccttgatggttactttgacaagtagtgactgaaaaggtgggtttgttttctttctttctctttccgtttttctgtttggtcggctagaaagcgtgtggctttagcgaggtctgtcattgcctgggcttcctggctggaacaagtaacttggtgtaacgttatctgggggcgttcatcaataaaaaatgctgttattatcttgattgaattcctattaggcaaactctagagaggtcagtgcgcgaactctgtttaagccggcgtgtttaaggcagcagagtaaaccaatagcccccatgctctgtgcgatttcattgtgtgctcgcgttcgcaagctccgtagtgcaggaaggtgcgggaaggtgtgtctgtggcccgggaaacgcacgccctctcccagagaacttgggtgctgggatggggaggaaggggagagttgaaagctaggggagcgagacctcggggcgtgcgattctcactcgctccctcccgccccagcgcccacagccggggtttctgcagagggcgcgggacgcggggttccccggggctgaggctggggctggaacacccctcgaagccgcgggcgtcctgtccaaggcgccccaggagggcgcaggactcgcagggcgatgtcgcggggccctaggggaggaggtgaggacaggccccgggggagcggggagttccgggcgcccctcggttccccgcgcgaggaaaagacgcggcgttccctttaagcggccgcctcgaacgggtatcggtagcgcgggcgagcggggagcggggggcggggggcgggggggggggggcggcgccgtttgaccaatcgaagctcaaccgaagagctaaataatgtctgacccgggcgcaaggcgcagcctggagctccgggtccccgacgctgccgccgccgcgcccgggcgcacccgcccgctcgctgtcccgcgcaccccgtagcgcctcgggctcccgggccggacagaggagccagcccggtgcgcccctccacctcctgctcggggggctttaatgagacacccaccgctgctgtggggccggcggggagcagcaccgcgacggggaccggggctgggcgctggagccagaatcggaaccacgatgtgactccgccgccggggacccgtgaggtttgtgtggaccccgaggtaggcaagcgctgggaatggggcttggtgcaggagctgcccgtccgcgggagagagttgactgggggatcccccaccccaaagttgtgggacgaggccagtctccttctttcctcccctccggtagaagggacgatttggagttactcttggggagttttctcccccatcccacaacccagaaggtcagccggcaccaccagggaaaaagggacccggggaagtcacgaagtagaggagggaaggcctggaggagacccagagctgcgtgatgggagcaaagacggcgacccggggatccctcgcagccctcccccagcccaggagtagtcgagagagacttagggggccagagctgtcgagggtcctgactgaggggagggtgctggggctaggctaggaatccttccagggggtgggtggtccccgcgccgacttgcggggggagtgggagggaagcttgcgccttcagcccgcatcccttccccggagctgcacacggctacctgctccccaggaattgagactgaagtggacttacaagtccgaagccaatgtagcttggaaaacttgggaggcggaattcctaccgctgggaactgaaagggtctgcgacactctcgggcaggccgaacccacatctctacccatcctgcgcccctcttctgaagcgccctccagggaagttaagagttttgactttcggggagtggttgggatgtacgtgggggattcttgactcgggttagtctctggggatgcagagccgggaagaggaatgggtgagtgagttactcctggaaagaaatagctgaggattgggggctctgtgcctgacgggcaagaagaaggggagattacagactaggggcatccctaaggaagaagcctcggggctgcgagggtgaactggaggatgcagtgtttgtgtgttgggggtagagcggggatgagggaccggggtggaggggaggcgaggaggaggaggggacccagagaacgaagctagggaaggtagagggtgccctctgccggccatgctgccaagagcagctactgggggcgggaggctgggggtggggaagtggtaaaggaaggttttgcgggatcccttagagagctggtaggagggacttgttgaatggtgctgctgactccagctcggtggggcgtgcgactcgtcgtcggtggattttgactcctcgttcttgtttggcttctatgcaagttttcctcgcgctgggggagctttgataagcctcgattggcggtgtgttagggcttcttggatcttattttagggtcctctagttatcctgcacttactccttaatgtcagtagcaaccaaagaacattttccgacaagcacgcaggaatgttcttggccagaagcaaagaaaggcatatttctgagtgtttattaatcctcctagtaatcttttaaagcaaagtaatatgtaattgggaacgttgattttctaactgcatataaaaggcgacatgatattaaatgagacccctccctactgactcaatatcctgcaaaatctctctctcccctttattattatggaaaaatctatttttatatgagtttgttgtaaggtcaaaagccattttggtcttacaatttgatatgtctttacattttaacttattgaggcataattacagatttaatttgtatgaacgtgtgtgccttcaatgcttatctcatgcaacataatttttaggttggagatttctgatgttatggcatgtagcgtttcaaggcattacacataataggtaacatagcatgttgaaattacaccacaaagttttgaccctgggaacagcaccttttaaaaacaatcactaaactcctgttcctgttttctgattttgcaaatgccttgcttaagacttttttttttttttttttttttttttttttgggaaatttacctctgggttagcaggagaggtaaaaaaaaggaaagagacacttgttgaaatgtaaccataacctttactggaatttaaaacatgttggtcaccattactggaattccagggccataaagtcgttgtcttttttttcttctacttcattttgtaaaatgtgataaatgttggtaaatatagaccagtagtaagtattatgacactaaaagcattatgtatgtggaactattttaagttattacagaacattttctatttataaatgatataagcagaaagaaatgatttccagataaacaaggcttacgtacatgttttgaagcattagaacattgcagacactcttagacatcacattttttaaagcaaaataacagtaatttttcacatacctttggagcctttcatagcccattcagagctgagttagtagctggaagtttcctttattttaaggtgatattttaaaaccatttaacatgtatagtaggtcaacattggtgcatccagaaaatgaagcatttaggaaatctgtttcagtgtcttttcaatgtgtgtaacttttacttgcaaaccaatggaaccaagaaagtcatcatttgcctaaaatgcagtcatcacctcaaatgattcatttatactatgtgagttaattgccttcatctcattaatggccaaggagggaagggaggtcctggggtatttcttgttcattttgactcaccaggagggaaaatcctgtaaaaaaagaaatgcaaatttctaaaatcctggctcaaagtccgtgggtttcctgtttaaaaggggcgccatgaaaatgtaagctattccctttttcctggaatctttaagagtcccagcttttcaatagtcaaaatgtagatgattgatatcatttcttatatgaatagcactggtttgtagttcagcacgcacagtgagctgggcacgcccacctgatagtatagcagagaacttgtttacattctttttacattcatcttctaaaacctggggtgctctctctctctctctctctctctctctctctgtgtgtgtgtgtgtgtgtgtgcgtgcacgtgcgcgtgtgtgtagagggggagagagagagagagagaactgtgaactgtgaaatataacacagccagcagctttgggtctcaatcgtagacttactcttaaggaaatttacagaatggaaaggtcatgttcaagtagtttattaacattttgagatgtaggaaattaatcccggagtacagaagaacaatttcagacttcctgaataaaaacagacagcatagagagtggatgatagctaaactctgaatatcttttgagaagaaaggcactcccatttcaggtgcccataatatggatttgattttagtgattaaaacattaattttcaacttgcatctccctgtgtggaagagttcaatttgtgtgaggggtctcgcctatccaacaaaagtgaatatgtcccttttatagggtaattgctaacttgtctcaacttgttttcaaacaattgttatagagcactcagtttccactaattgcaaaattgttgcttaattgaaggactctcagccatctagtgcagccattcagccactggcaggctctgtgatctcaaactgtgaattgcattttaaagaggaatcgaggagagaattctgtggaattctaggttttaagtgctggctgttgttcaatggaagaggaaatcatttgaacaagaatcgcatcaagttgtgttgtgataaattttctttattaggatgaataacatgcacagatgagcttcaaaagtgaatgagcaaacttactggttacactctgcatccatttactctgtttagtatggagtaatgttaggcaataaatgatgctggcaaatgaaatccgtatgttatttgcatgtggtatttaaacctaggaaacatagagtggctttggtatttgtaggcttagtcatgtgtgtcctaaacgtcctcttaaacttctacttaaggcatagaattatttaatcctaaataattttatacttaagtgcctcactggatttccagaatatttacactgtaaagatttagaaaggtcatgaacccaattattgactatatggaatcattattgatggcagatgcaaaatggagctcactaatgtactgacattgaaaaccttttgcaggggagaggagggggagtggtaaatgtgtgtgttctttaagtggaacaggaaggtattctcttttctgtagaaaaatttgagtatctggtcagataagtgtggaagctttcatttaaattaagtatttaagttcaagtagaagctctagggcacttatcctcttgatgagacaaatcttatcaaatatactagatgctaagaagtggctcattgccctgatgtctcatttatagattgatgtttgaggatgggttgcattaagtgagttagggggctgagtgtgggacaggagaacgattggaaggaagcaaagtaaatttacaagctttagtgacagccataataaagtaaaagtttatttccagagagcctagagagtaaggaacgttatatagttttccccaaaggttcacttgaaagaacttttcattggttgtcatggtagtaatgtcctgattttgaaatctcccagaacctagtagctcttaaacatgctttcatcttggttcctttggtctgacggaaactttatgacgaccctctgtgtttttgacatgcctctgcatttttggagagaggaggtcaggcaagggaggatttcttaaaactaagacagtatagtaaggaaacataaaattatatgataaaaaatcactgaacttcaaattgacttactgaaataaaacctagaaggcaacctgtcgtttaattacaactagcttgtataaaattaaaatttataaaatgggaattcaaagaaaataaacgggcagttccaagtaatttaagcaactcaccaaaaattgaagtaatagtgccacctagagaacaaaatcaccagctttactagccaaatggcttatttccatatgaaccatttttccaacgctacagttactaggatttccttgttaccatattcagatcttgtgagtgtgtatgggggtgggggttgcatgtggaattacagatgaaattttaaaacaagcagatccacaatttgatatatgcactaaatccttttaacgttgtaatgtagccaaatgtagaatagcatgccaggaatcaacggctagcatcctttttaacatttattattttcatggatatgtaccaaaccgaaccattgagtataaaggttctgattttatttatttgctacaggcaattcattatactttctgagatacaataacaccaaataatttgagtagagagacctttaagaatgttttcgatttatgatctacctttaactttaatgtactcagaagatgtgagaataaaataaagtcaaatataagcaagattttaaacacacacacaaaaaacaaacaaacaagaaaaaggaagaaaattataaggattgccttaaccttagaatagatgaaggtatacatctgagccagcaccaaaaaaaaaaaaaaaaaaagttatggaaccaggaaccaataattacaaattgacttaaaattcttggatgacaaaaatctatatttagttcatttttgcatgcgcccacaacagcatccaaaacagttctggggaggcactttgataaatgttgctgaatgcactaatagattgattaatggctgcttcagattatcactagtgatgtagacagaaacttcatgaaaatggtttgtcttgctggaagaaaggcagaaattggaggaaaaggtttaataatatttttccccagtacctattataaaagtcatttagttggcttagttctataatttcttatgtgtaatttgattcacttatgaaattgtgaatatatgaaatgttaaagttgatttagacagcaactataagcttgtggattttcttttaaatgtcttcaaatttttaaatgccagtggagatgccagcgactgtgcttcagggagtagaatatagtatatcttaaatttgtgccaatttctggtaagcagagaaaaaattgcatgataaccaaagaaagtcatattgtttgtgctttgtgttattcatggaagcaatcaggtgcagaaaactttctttttcagaaaaaaaaaattactaaaataaaggtgcgtgtgtgtgtatgcacatatatctaaagggagagagggagaaggaaacttactaaataaaatttttgccacatgggatttagtctaatcagtcttggttttggagttgctatcatcagtagttccattttgtgattctttctttctgccttcatgtgcctttgaaaactgaaactatgcccaaattaaaacaagtttttctgtcttttcacatgttcacttatttcttgaatgtgtttttaaacacagacaaacttcttttacatcatgtagaatctgaaggtcgagaaatttgcagtcattttgctggagagagatgcttggcggagtcccaggccacattcctaggccaaactctcgaaggtattcctcttatgcaacattgggaaaatacatccagcaccgacatgttggctgataatgtgtctgaaggcacagacgatatgcttatcatatgaaacataaagccagcagatattgcagacattctgttgaatgatagaatctggatcatttacatttacttaaatgtaaaatactatgattaagtacaaaaaaatcaatttaggagagaatagagagttgcgggcacggttttaggggatgacttatcagcagattgtagaaaggaagcttgaatgttttaaattaactgcaagttcagtataagccagtggtgtgacaagaggctgttatcatagctactgaaattttgggctgcactgctagaaatataatactgaaatggagaagctaataattcttcactttttaaatagactgtatctagaatattatcatcagttcaaggaaatgaaataagttgttttaggtacatcatcgataaattagtgtacattcaaatcactgtgaccaggatgcatagggaatttgaaagcattgcatgtgagcaatggttgaggggacttggaatgcatgacttagggacaagaaaacttaggctggaatggcaagtggtttttgaatgttgggttgagaagaattctaaaactgtgaaggattagtaaaaataacattcagattgctaatgcctactgtggctgggagattagagtgtcaacatgtgtgatgtatttttgacatccttattttgaggatgggcttcaaagatttgacgaactgtcataagtgtaatttgtgttgcttcagacagcagttctagaaccaatgatgtaaatttagatactctacatggtagttagaaaactttccattaatttaatttagcaaatattgaatgctcactgcatacagagcactttattagaggaatatataataaagaaaaaagaggtctggtgtggtggctcatgcctgtaatcccagcactctgggaggctgaggtgggaggatcacttgagcccaggagatcattacgagtctggacaacatagcaagaccccatctttacaaaagacaaaaaaaattatccaagcctggtgacaggcacttgtagtcccagctacttgggaggctgaggcagtaggatcgtttgagcccaggaggttggggctgcagtgagccgtgattgtcccactgctcttcagcctgggtgacagagtgagaccccgttggagggaaggaagggaaggaaggaagaaaggtaggaaggctgaaatgaaacccttttagaaatgacactaaaatgggaggttggagtaaggtattttctgaagtgcctttgtacttgtttttttctaatgcattggccataagtctgctccttatttatagtccataaacaatcctaatgagaacagttatatatttctgcctttgaatcatctacttgaagtgtttagcatcatgaattgagtatcagaaatccctcccatttctttgcaaagcgctgtattttacttttccttatttgtatacagattctcaaaattggctatttttcctttgggttagacagaacagaatgtctggaaaaaaaagttcttatcaaattcaggtgcccaaattgcttaagaaattaacttttgaggttatatttttttagggttcagtagctaaactaagaaaacttctcaccgttcaccttcacttttggaaaccacaaaatcttcagatattacagttttccaaagagtttctctttttaaatataaactaaaaggaattgactcctcccccaactccctcaggcctcagcatggatagagttactttttttctttaataatttatttataacttattttgctcttctgtagaacagctggagattaagcaacatggccatgacataaaatgcaagttagaccataagatgagcagcccactccaagtatgaatgagtacttattctttgtgatctctcatactgcttttaggtattaatagtgtcagtcagcaaagcaaacagtttaatatttacatctcctttaggatatcatatagtttatagtttgtatgtgttcttgcgtgtatgttttcttctgtttcaaattcttttttcttaaagtaagaatgttatatgtagcaaatggttctttcattaattcatttgttaattcaccgtgcattaattgagtgcccagtgagtgtcaggcactgggctacttggatttcttttccctgtattgatccatatatcttcaggtgctccttgatatggctctccattgactctctcatataaggctttcattacctattcacatactccctcccaaagaggactggtccaaaagtaaaatcttgagcaagttctctgagttatttcagaacttcttgcccccaaactgtatttttaattattgactggtagcattttggaataacttacctctcttttttaaagattgaagttctttatcctctctgattttcaggtgtcagtttgtgtacaaattgagacaataaaaatgtttgttagacattttcttaaagcattttgctatgtgagaatctttcatgaagaactctttttaacaatgactctatagcagaagccacagtagagggagaactactgaatcaaagatggtgtttgagtctatgattttatgatggattttttttttttttacatacaaggatatgcatgggtcttttagtattcaggaatctgttcttcacttgacagtatttataaattgtgtgtttccccctaaaaaaacttaaattgtgagaatgcttccatttactagaagttggttaatgattatgccaaataaggaaaataagacagaaaaatcagtttagtgaatactattttgcctttaaatttagtaatttagtaacagtatctctttggggtttactagaaaccactttttaatccaataggtctctttcattgtgaagtcaggaggtgattttgcttaaatgtgtagtataggaatctatatgtggtgttcaaggatcatgtaaatatgctgatataatcggagcacagtttggcatcattaactcagaaatatttaaactcttgctatacaacatggaagcaaacttgtgcatagtttgtgtgtgtgtgtgtgtgtgaatctcaaaaaaagaaaaaaatcacaggatcaggaagtcggaataggtcccacttttcttctagtaccaaacctacagccatgttcctagccttctcttttactcccaagcaagacagacaggcaaatgaccatcctgctgcccatttctgtgtatattcacttgcattgagagttgtattcacctgcttgttgagagtattcacaaatggtacctgataaagtagatacttctttaaacatgtgaatttttttgcattgtataatgtttagaaataatcatgtataaatggttgaatattaatacaggattgccttatcaagtattttattaatcattaaaatgtggtgtcattaatacaatttattttaagtgcttttcctaaaataccagattatttttctgattttcacatccctgacaatgactttcttaaacttggtagccaggaacagaaaacctaacactgcatgttctcactcataagtgggagctgaacagagagaacacatggactcagggaggggaaccacacacactggggcctggagcagggggcaggggaagggagagagtgcgtcaggacaaacagacaaatagctaatgcatgcgagccttaatacctaggtgatgggttgataggtgcagcaaaccaccatgacacatatttacctatgtaacaaacctgcacattctgcacatgtatcccggaacttaaagtaaaataaaaaataataataaaataaaataaacttagtagcatctattgttccagagcctgtaattgctcttcaggcagtctcacataaaaacctaggagaaccttcactgtcactgttccatgaggtgttaggaaaacttgctctactgcagtgccccagtaggcattggtactgagaccaaaattcagctggtttgttgttactacgattcctacgtgatttcacttgtcatgtagacaagattgcacacttcaataataatcttgtccaaatgtgtggtattccatacatttttaaaatgcattcacatatctcattccatttgatcctacaaataactctataaaaaagattggcagacattatttctatataacagaggaggaaactggagcttagagaagctaaatagcaatccaaaatgcacagctgtagaaccagagcaaggatgatagcccagtgacttcacctaacctagtccccttaccaccactccagctgtctataaccaaaacctgcagtattcaagtaagaaaccatatcttgcccttgatgcattaatgtgagacctggagcaggaacaggctgatattgtcaccctggcctactgtccacctttgtctccagcagagactggtacccttctgtgtgccaaggaataaagtggtaatgggaagattaaaaatgttttttccaaggagttttttaatttaatttttttaaaaaagaaaaaactcttagagggaaaaatgaatatatgacttttgatgtattgttccttagtaacttagttataattttacttaaacctgagactcttgctaagtgaatgattagaaatattaggtggctggccagatggcaaataggaacagctgcagtctgcagctcccagagagatcaatgcagaaggtgggtgatttctgcatttccaactgaggtaccgggctcatctcattgggactggttagacagtgggtgcagcccatggagggtgagccaaagcagggtggagcattgcctcactcaggaagcgcaaggggtcaggggaactccctcccctagccaagggaagccctgagggactgtgccatgagggacagtgctatctggcccagatactacacatttcctacagtctttgcagccggcagaccaggagattcccttgggtgcctacaccaccagggccctgggtttcaagtacaaaactgggtggccatttgggcagacacccagttagctgcaggagttttttctcataccccagtggcacctgaaattccagtgagacagaaccattcactcccccggaaaggggctgaaggccaggcagccaagtgatctagctcagcagatcccacccccatggagcacggcaaggtaagatctgctggtttgaaattctcactgccagcacagctgcctgaagtcaacctgggatgctccagcttggtcgggggaggggcatccgccattactgaggcttgagtaggctgttttcctctcacaatgtaaacaaagccactgggaagtttgaactgggtggagcctaccacagctcagcaaagcccctgtagccagattgcctctctagattctccctctctgggcagggcatctgggaaagaaaggcagcagccccagtcaggggcttatagataaaactcccatctcatgggacagagcacctgggagagggggtggctgtgggcccagcttcagcagacttaaatgttctttgcctgttggctgtgaagagagcagtggatctcccagcacagcacttgagctctgctaagggacagactgccttcttaagcaggtccctgaccctcgtgattcctgagtgggagacacctcccagcaggggtcgacagacacttcatacaggagagctctggctggcatctggtgggtgcccctctgggacaaaccttccagaggaaggaacaggcagcagtctttgctgttctgcagcttctgctggtgatacccaggcaaacagggtctggagtggacctccaccaaattccagcagacctgcagcagaggggcctgactgttagaaggaaaactaacaaacaggaatagcatcaacatcaacaaaaaggatgtccacacgaaaaccccgtacaaaggtcgccaacatcaaagatcaaacatagataaatccacaaggatgaggaaaatccagcacaaaaaggctgaaaattccaaaaaccagaatgcctcttctcctccaagggagcacaactctttgccagcaagggaacaaaactggatggagaatgagtttgatgaattgacagaagtatgcttcagaaagtgggtaaaaacagactcctccaagctaaaggagcatgctctaacccaatgcaaagaagctaagaaccttgaaaaaaggttggaggaattgctaactagaataactagtttagagaagaacataaatgacctaatggagctgaaaaacacagcacgagaactctgtgaagcatacacaagcttcaataactgaatcgataaagcagaggaaaggatatcagagattgaagatcaatttaatgaaataaagcatgaagacaagattagagaaaaaaagaatgaaaaggaaggaacaaagcctccaagaaatgtgggactatgtgaaaagaccaaacctacatttcattggtgtacctgaaagtggcggggacaatggaaccaagttggaaaacactccttaggatattatccaggagaacttccccaaactagcaagacaagccaacattcaaattcaggaaatacagagaacaccacaaagatacccctcaagaagagcaaacccaagacatgtaattgtcagattcaccaaggttgaaatgcaggaaaaaaagttaagggcagcgagagagaaaggtcgggttacccaaaaagggaagcccatcagactaacagtggatctctcagcagaaaccctacaagcctacaagccagaagagagtgggggccaatattcaacattcttaaagaaaagaattttcaacccagaatttcatatccagccaactaagcttcagaagtgaagtagaaataaaatcctttacagacgagcaaatgctgagagattttgtcaccaccaggcatgccttacaagagctcctgaaggaagtactaaataaggaaaggaaaaaccggtaccagccactgcagaaacataccaaattgtaaagaccattgaaactatgaagaaactgcatcaactaatgggcaaaataaccagctaacatcataatgacaggatcaaattcacacataacaatattaaccttaaatataaatgggctaaatgccccaattaaaagaccacagactggcaaattggataaagagtcaagacccatcagtgtgctgtgttctggagacccatctcacatgcaaagacacacataggctgaaaataaagggatggaggaagatctaccaagcaaatggaaagcaaaaaaaaagcaggggttgcaatcctagtctctgataaaacagactttaaaccaacaaagatcaaaagagacaaagaaggccattacataatgataaagggatcaattcaacaagaagagctaactatcctaaacatatatgcacccaatacaggagcacccagattcataaagcaagttcttagagacccacaaagagaccaagactcccacacaataatagtgtgagactttaacaccccaatgtcaatattaggtcaacgagacagaaaattaacaagcatattcaggatttgaactcagctctggacccagtggaactaatagacatctacagaactctccaccccatatcaacagaatatacattcttctcagcaccacatcacacttattctaaaattgaccacataattggaagtaaaacactcctcagcaaatgcaaaagaatggaaatcataacaaacagtctctcagaccaaagtgcaattaaattagaactcaggattaagaaactaactcaaaaccatacaactacagtggaaactgaacaacctgctcctgaatgactactgagtaaataacaaaaagaaggcagaaataaatacattatttgagaccaatgagaataaagatacaacataccagaatctctgggacacagctaaaacagtgtttaggggaaattcatagcaataaatgcccacaggagaaagcaggaaagagctaaaatcaacactctaacatcacaattaaaggaactagagaagcaagagcaaacacattcaaaagctagcagaagacaagaaataactaagatcagagcagaactgaaggagattagagacacaaaaaacccttcaaaaaaatcagtgaatccagaagctggttttttgaaaagattaacaaaatagatagaatgctagccagattgataaagaagaaaagagagaagaatcaaatagacgcaataaaagatgataaagaggatatcaccactgatcccacaaaaatacaatctaccatcagagaacactataaacacctctatgcaaataaactagaaaatctagaagaaatgaataaattcctggacacatacaccctcctaagactaaaggaagaagtcaaattcctgaatagaccaataataagttctgaaatcgaggcagtaattaacagcctaccaaccaaaaaaagcccaggaccagacggattcacagctgaattctaccagaagtacaaagaagagctggtaccattccttctgaaactattccaatcaatagaaaaggagggaatcctccctaactcattttatgagtccggcatcatcctgatacaaaaacctggcagagacacagcaaaaaaataaaattgtaggccaatatccctgatgaacattgatgcaaaaatcttcaataaaaaactggtaaactgaatccagcagcacatcaaaaagcttatctaccatgataatttggcttcatccctgggatgcaaggctggttcaacatatgcaaatcaataaagataatccatcacataaagagaaccaatgacaaaaaccacatgattatttcaatagatgcagaaaaggcctttcataaaattcaacagcccttcatgctaaaaactctcaataaactaggtattgatggaacatatctcaaaataataagagctatttatgagaaacccacagccaatatcatactgaatgggcaaaagctggaagcattcatttgaaaaccggcacaaaacaaggatgccctctgtcaccactcctattcaacatagtattggacgttctagccagggcaatcaggcaatagaaagaaataaagcatattcaaataggaagagaggaagtcaaattgtctctgtttgcagatgacatgattgtatatttagaaaaccccatcatctcagcccaaaatctccttaagctgataagcaacttcagcaaagtctcaggatacaaaatcaatgtgcaaaaatcacgagcattcctatacaccaataatgacaaacagccaagtcatgagtgaactcccattcacaattgctacaaagagaataaaatgcctaggaatacaacttacaagggatgtgaaggacctctttaaagagaactacaaaccactgctcaatgaaataagagaggacacaaacaaatggaagaacattccattctcatggataggaagaatcaatatcgtgaaaatggccatactgcccaaagtaatttatagatccaatgctatccccatcaagctaccattgactttcttcatagaattagaaaaaactactttaaatttcatatggaaccaaaaaacagcccgtatagccaagacaatcctaagcaaaatgaacaagctggaggcatcatgctacctgacttcaaactatactacaaggctacagtaaccaaaacatcatggtactggtacataaacagatagatagaccaatggaacagaacagaggcctcagaaataacgccacacatctacaaccatctgatctttgacaaacatgacaaaaacaagcaatgcagaaaggattccctatttaataaatggtgtcgggaaaactggctagccatttgcagaaaactgaaactggaccccttccttacacgttatacaaaaattaactcaagatggattaaagacttaaacataaaacataaaaccataaaaaccctagaagaaaacctaggcaataccattcaggacataggcatggcaaagacttcatgactaaaataccaaaagcaatggcaacaaaagccaaaattgacaaatgggatctaattaaactaaagagcttctgcacagcaaaagaaactaacatcagagtgaacaggcaaccgacagaatgggtgaaattttttgcaacgtatccatctgacaaaaggctaatatccagaatctacaaggaacctaaacaagtttacaagaaaaaaaacaaccccatcaaaaagtgggcgaagggtatgaacagatgcttctcaaaagaagaaatttatgctgccaacaaacatacgaagaaaagctcatcatcactggtcattagagaaatgcaaatcaaaaccacagtgagataccatcttatgccagttagaatggcgatcattaaaaagtcaggaaacaacagatgcaggagaggatgtagagaaataggaacacttttacactgttggtgggagtgtaaattagttcaaccattgtggaagacagtgtggtgattcctcaaggatctagaaccagaaatatcttttgacccagccatcccattactgggtatatactcaaaggattataaatcatgctactataaagacacatgcacatgtatgtttattgtggcactattcacaatagcaaagacttggaaccaatccgaatgcccatcaatgatagactggataaagaaaatgtgacacacatacaccatggaatactatgcagccataaaaaaggatgagttcatgtcctttgcagggacatggatgaagctggaaaccatcattcttggcaaggtaacacaggaacagaaaaccaaacaccacatgttctcactcataagtgggagttgaacagtgagaacacatggacactgggaggagaacatcacacactggggcctgtcagggtgtaggaggctaggggagggatagcattaggagaaatacctaatgtagatgacaagttgatgagtgcagcaaaccaccatggcatctgtatacctaggtaacaaacctgcacgttctgcacatgtaccccagaacttaaaagtattattattattattataataataataataaaagaaatacaataaaatagaatgcagcatacagcagtgattctcaaacacattcagcatcagaattacccttgaatctttaaaatatatatacatatgagatcttagtctccaagatttgtaagtttggtattgggtccctgggcctatgttgggtttagaaacttctacagatggtttggatgtatgggacagtttaagaatcgctgaactaaaatcaaataaactgaatatcctgtgatttagagagacttatcgtttatttcactatccaagtacttgcattagagcgtggctagaagggatttgcagccttgtaaataatcagaaattcagacattttgagatgagagaactgctgaagattttattctgacttgaaataaattttctaattagaaacttccaggtgagagcaaaggcctggaacaatattcctgagccagaggaggatcgagtttgactccaggcctaacacttactaggtctatgaccttgggtcagtaatttaaattctctgtatctcaacctctcaacagggtattggtagggattaaatgtgttagtgtctgtgaagtgcttagagcagtgcttggcatagtaaatgcttaatgaatttcagccactgtttttatttttagtactttccagctcccccaaaaagatactttttttagacttgtattaagacaataaaaagtttaatcagcatgcttcatacctaaatatgcttcactttatagcaaagtttacaagactaaaactgttttgttgtaattctctgagtctcatgtgtttattaatgattttttctgctgtttattcatctgaattctactcattcttcaagacctagctggaatcctgtttctagaaagactcttgcccataataataaacctgccctatctgagttcctaggtggtctgtacctcataatttggtaattaattgtatatgcacttatataacaaaacattattgtgtgtctttgctgtatcagattctaggctggaagttgtagatatgatgtttttgtctagaaaaatgttctagaatgtcctactcaggacagtctgttgactttaaagacacatttcctaaacagacacttcatgaggcagccccagcctgtacctgtgttcctggacctgatgatcaagtttgatttaagcctcaccacttactagctctgtgattttgggcaagttacttgaattctctgtgtgtagatagaacaatgttgagggaaatccctttcccccatccttgtgtttccacaagggaacttgcttcctaataagtaacactttcaggggaatattctaggcccttctcttatccccattacttgttctttctgtgaaaagaggagaggttaatctgatggatgaaatccttaatctttcatcttctggactgtagagcctgtgaaccaaagcaatggaccacttgcactgaaattgaggctgaccctgtattttgattcttatttggcaacttatttctattctgttcccaattcaaaatcccaaggggagaaggaagataattgattaccagaagtatgtaatggtggtaggaagttgaataaatggtaactttttaaaagttgcatgagatatagtccttatcccagagaagctaagtttgcttttctttcctctcatgtattttagtattatttctacaattagattgtaaaccctttaaaagcaagaatatttctacattttcttactcctgatagcacacagtagactgctgggcacatacatagtaggtggctctgtaggtacttgctaaatgattcaacatgtttttccctcatggaaaagaaagatttcagtattgttcttatcagctaggaaggcactctgaataggaaatcagttctaggcaggtatccataaatgggttatgatttccaacttacttgccccagaggctcgctaatgttgaactcttcatgggtactttgtcttgcttcatgagctatacatgctaaggggttagcagatcatataatcttttgatctacaaaatatgatctttattgaacaaaaacttgggccaaaggcctttctcctttgccaccttcctccctcttttcattctcttttttgggaatgccctttgtgcatgttagttacagcatgtaccacattgcactgtattgttggtttttgggtctaacccacccttaacactgcagtccccaagggcagaaattcagtctcattcattttgatgtcctcagtgcctgtgctcagagaatatctattatttgaaaaaatagtgcaaaagtaaattttaggagactacatcacactcatctaaactgcaagtttgacaagttgacatccaaaagaaaggctctcctaaataacctcgccacagaaatttgggtgacctttgtagctctggagaaagcagaggcaaaaatgaaacctaaaaattatttgtgggtttttaaaaaatgttttctcatggagtaaaggtctacagctgagttcttttcatatgagggaatgacagaaacacagctggttctgactttcagcttcaactgagcgaccagagctctgctggtgaaacaggaacttgtattgtgcccctgacgtgcaccttgaaggtgtcagctcattgtccctttgttcacataaatagttttttaagaattgtttttgatcttgtgagcctctaactaaatgattaaccatgcaaagttggccatttggggtaatactgaagcacttctcttgagggctattgacaggtgggaatgtgcccacctccttgggtctctggttttcatgtcatacttgcaaatcagtgacagtttaaacttggggcaatcacttagcaagtctattgagttaccaagttaattattcccactttgcatgaagcaaccttgaaaatgattttcctaaagcaaagtacatccaaactcagtaccttcttaataacctttgctgaatgaataaatgactaattcataaaaaatgtaacatatctttaattcttacttacgggcagtttaagcctcttgtgtaagaggaggcctcggcttgagataacataggatagtaagcctcctagagaaatttctatatggaaacatggtctgctatgaagctagaagtgagaggacattatatttgaccattatatttggcttcagagcttctcaacatggggcccaaagtcaaggtcccttgtttcattaagaggaggtccaggagtgcatgacacccatcagactactgagacccagctggaactaggcaccttgcacaggggccttgcctaatcaaaatagttcttattttttctgagttccaagtaactagtttcctaacccagtgtctggatagtagtgccaagtgggagtaccttcaatgaacttcctcatgaggttatttctagcctattggaatgtttcgttttaggagggtgaggaagggaagtcttgaatttttgtgcttagtttaatgttgtgatacagctttgaccatccgtttaatgggagatctgttttccagatgactatacatgtggaaaggagaagttttttgagtgttttttttaaccccttttaaagaatggtttttcatttagtctctacatttgggggtaaaaggtcctctagggagacttttcaaaagtatttgaagtttgcatctgatttcagaggtgagttggaggcctatctgtgtatgacagacacatgtctccaacaactatatgttcacaaggactaagagccatccttttgggtccatcattcaacattgatctcacattcgtgttcgtatcagtatctttacagtgcgctcccagttacatctccctaatttcccttagtaggcttcacagaatttgcagtgtatgcaatggcagatgaccacatgtggagtcatttaaccacatcttccactgcaagtcagcccgctcttgatgtctgtttatgtttagattccatcttttggaagatttcattcctctgcactatctcagtatctcagatgcttttgagactgggtccttttcccctcctatgtttggccatggccaccccctcagggttgtgttgtgtttcacagctgctgtttgtagggttgacctttacaatgtacaaagctctttcccatatgttgacaatccctggtgtgatgctgtgagttaggcagggtgtgtatacgtgtcctcatcatattacagtggtaaggcaacagggtttttgaatttgatcacccatgaatttgtctaatttgttggtaaaaaatggtcatgtatcagccgtttcacagggtcagcttaatagaaagtgggagttaggcaggaccagaattcaggacttcagcccccggtcccagggactattctctatacccaattgtcccaccttgaatcagtttcttctagggaaatatctccaaaactgagatggcacccacaggacttcttaattgtagtcattaccaggaaaaacaagcaaaggaactggtgtaaatctctgtttttggtgattggtggagatttggagattgtcttgtgtcaaaagtaaagccactagattaaatgttttgttaataaattggttatttttaatttaattatttgacagttaatttacattattcaaaaatcaaaataaaatttaaaagaagtttacactgaaaagtcttgccccacttataccctgctcacctcagtatcccccaatacataccatctataaggtgatcatttgtattagtttcttgtgaatccttgatagtgtgttttatatagatacaggtaaatatgagtatgtactattatttcccccccaccccaccctgttttttttttgagacggagtctcgctctgtcgcccaggctggagtgcagtggcacgatctcggctcaccgcaagctccaccattttcccccatttttaaaacaaaaggtagtagccatatatacactattttacaccttgttttatcacttactaatatataccagagagctttccatcattttgtacatatgcacctatatctgtcaattattcccagaagtggaattgctgggtcagcaggaaaaatcatgtataattttgataggtattgcctaattgtcctgcacagggcttgaattgtttgtactcccacctttagtgtatgagaagacctgtttctccatagcctcatcaaacagagtgtgtgagattagatgagaaataggaggtgagcagtcttttaccccatccgtagtttgcagtgggaacactgcacagttgcaagagctggtgcaggtatcagattagttccagtggaaacgctgcctcaccatggccatgggcttgcgccagctctagtgacacacacggaatggacccacgttgccacttgcagaatttcctgtagcagaaagttgaacatgcattcattattcatctaactagccatgctggatctaaagagcacaacagtgttttttagaaccaaaaagaaaattgtttcactacaacacactgtgtataaggctttcaatgctcttttctcagctattaacattattttcaggactgagttcaagagatgtatcccaaatcacagggatgtcttgctaagcttggaactttcatactcaagggatgcttttttgaggaatgattttacacttactcaacatttgtaattaaataattagtactttataagataaatttaaactgtccaagtacaatataaacattgaactatgatgcattattgctagactttttccttaaagttgccaagtggtttcctgcattaggcaaataggggatcatataaaaatgccatgatttacggcctagataacatctccaccatttgagcagcatatattccaggtcatccccacataactccttaccattctcattagaaaggttgattcttagtcttatttttctctgaggacagcaaaaaaaaaaatccccttcagttccactgcatagaaaagtgtggtaaatggagccgggcacagtggttatttaatttaaatggacaatattttttatagaattttgacagggccactgtataggggaaagtcactcctcttcccctttatagaagagttgcacctggacagttgcattgatgactgtatccagtctacacaagaggtcattcctgggcataagaatggactgccaaaatctagctgaaacaccattgacaaatagacattttcttttgttaataatacctgtgaaggctttcataacagacatttccagttttgttctcaggctccttgcagctgctcctctaaaagtgtgctctcttccaagagctgacaatggccagaagcaaggtgttctgtcttttgtgccatcatcatctaacttgccacacacatttgggatgtcagcctaggtataggttttgtatccactcagtatggcttgtgggtctggttgcctttgttattcatgctgagggcctctgggcatcagtttggtgtgagagaacccattccatgaccctccttcctttggctgttttgactcgatggctcttgttggcacagtctgtgagtgtctgatgctctatccatgccggaccatctgttctgctgtctctgtggtctgaagtcgttttctgaactattccttgataataaatttgagatgatcttgttctacctttcttttcaagtcacatcttagccccttagccacattcccgaagaacatgacaaatggatgggtcacaagtcacgtagcatagggtgtcagaccacgaggctttgaagggattctgttgggtgctaaaaagaaagattttgtgtcaccacgattttttttaaaggcatgttgacacttaggccttaattgaaagcgttcttactcaagtagagttgacagaggagtatttggtagtcgcggttgctggtctgaagagcatgtggttctgtttcaatgcccaatgagatcttctcacgggaaaatgttctgacatctcaaacaaatgaccttcatgcatagttttgacaaaataccctattaagtatgcatatatggttggtaccttgtggtaataattcaatactggaaacagagtagcaacaaagaaacattagggttatatttaacctctgtggaattagtgtgtaaacaaactgcttatcagaaatgctcatatggggctttgtttaaataaataagaaactggcatatagggtctgcaggatatttctgccaagtagacctccctcacattataagacaccacatctatgtctgaccccatatggaaagaggcatagcaagccagcactggttcatattccctctccaccacataatgggtatgtgatcttagggaatccaccgaaactctctgggcctcagtttcctcagctataaatggtggataatcaaattatttacctcaccattaataaatgttagctattattttttatcaagtttaatacaaagagaaacattttacttatttttccagctatccagagcatcttccaaaatcctatcaccaacaaatactgtattgtatttattatagcaactatgtaaaaatggagtccctgtcctatgcttagatgaaatatgttggtatttgagtttgcatgtcttctataggaatcagtgtttagtgaaaacgggtggagataaacagatgttttcacagtcctgttgttcacagtaccgccaaattgaatgtttccatataggtgcattctaatggcttaaatgatgcagatattttctggccagccatatggatcttttgtcatctaagatgttaatattttccttatattttatagtagttctggagtacagccagtttcttgaatagggtccacatggctcattatgcacagggcctggaaactgccttactcgtgctgttgaaatgaaccgtgacacttcagaagagctgggagctggggtagagcagtggctaggagaacatattcaattatatttcctcctgcattaagctacaagtaatgagcactttcctgtgctttacagttaagtaattaaaagaaattatagagtgggatgcaaaaataacccgaaggacaactggatgtgtggagccaccagttttctccatgagtgcacaaggttaatccttgttactactcagaatgctgagtttctacagaaagggttgcaggtccacacatgttttggcgtctacccacacgcttctgtatggcatgactgtgcatcccagaagaagggctgtgctgtgtacctccacgtttcagtggaatttaacaaactgatccctgaaaatggtttcataaaggtgagtaacagagagctaatagccttctcttgctaattttatctttcccccaagatttcttgataatagtttgaaaaggagtgttattctttggtctctagaggcaacttacctttccagtttcttccatcacctgttttcatctctcttgtttttttaaatttaatgctgtatgtatttcagaggataggatctaatctagtgcggtcccttcatcaggtgagaattattcatctcattttcattttagcccttctgaattaatgacattgaagcccggcagtttggtcctaagatgggtttaattatgtacagatactctttctataatggaaattgctcagataactaattaaccacaagaatacactgtctatggaaaatttcaggagcaccgtctgtggaaaaactgggaagggcatgctgtcaccacagctctggggtctattaaaagtgtggttatgcagcactggtgtctagtggggtgttggctctcaactgccagaattcccatagcatttcatggcagaaagtcaaggtgtccagcaatactctgaaagtgacctgttgattaaagtcgtcaattctgaagaaagagactgaaataagacaaatgggtcttaactttttttctctttctctctcttgtaaaaatgtgtgattgttctggcatgttcccaatccccacataatgccaacatcttttcttaaagggggattccctttatccttggatctgagaattattgcatgttctccctttagggacaatgaatgcagttgcatcacccttgcttttttttttttttttgtacacagcatgcttattcttggatgcagggacttgaaagacaaagccccacctggctttcacaacatctcctattagtaggtgtgccttgtgtgtaatttgaaggaggcggtcccttagctgtgtttacactgtacttttaaatgtggggctgaaggtagaatcaaccatacttaagatgccacctgggaaaatagggttctgtgtcatctcagccccacccatttgcaaatgacttaacagcagcactattagggttcctagtgtgagtcatttgcatttggactggtgaacttggtgacttcttggtgtttggaaacaaacaacctttgcagtctttcgtaaaaagcctgaacagtggaccagtctccagttctacttgcaaagctgcccccatcaaatccctcataatgttcaacttaaaaaatgttacacttttctctggaaatctaaccttttttccttttttaaaagccattttaagtacttcagtcttgaatcaaatgatcccaaatattggacaccaacctagaaattgggttacctcctgggaactttatcgaagaagagagattttggttggagagggggttttgatgtttgatacttatatttactattttaatatttcattgttgttgttgctgctgctgctgtattattttgcgagtttcgtttgtttaaatttcatggtatttggtaggagagagctggatctgttggtttcaggacaagtctagaaataagaaatctgccttgagtgagtgagttggttccctctgttgctatttcaccattaaggacgaaaggaactcacaaggaccagagacatctggctgaaagcaatactagtgtgactggacatctactacctgccatagttggtcatatcgtttccagtatgattctgattgagtgagtgatattaggctatgttcagggatcagggaggctaattatgcttatattgccttgtagcattttggtaagaattaatgattgtgtagatgtccagatttaggtcagcaatattctaaaagttctcattgaactaatcatgtttataagtagcctgtactttctatcataataacaatagtggaaaagctagttgacataaaaggagcccagattttacttaagtaaaaacacaaaagcaaagatattttcccacataaattacaaaagcaaagatattttcccacataaatgtccccataaaacaagttgaaccaaagaggaaagatgacaggtaaccgtatgacacgctaagaaagtatcataatacttaagttaacttcaaccttttatttccttatcctaagcagcctcttttctctttatcatttagtcctgtgcttctcaactttgataagtaaaaaagttattgcactaaataaatcttattgaaatgcaggatctgattgagtgggtggggtaggtggaatgagggtggggaagttgagattctgcatttcttagaagtttctactttatgttaaaatggctaatccatctcaacattgagaagtaaggtttcacttaatttcagcctgtgtaagtttatcccatatgtacatttcctaaaactctaatctcaggccccaggaatttctcctttagttaaaatatttttaggaataaatttgaattgcattaatacacaatttataaatttaacacaaaaaattatttgaagtttgagactttaggttgcatgaaatcaatttcatacttgaaaattttctataaattcaaaagtctgtgtatttaaatacaatttaaatacctgtgttacagtgacatttgtttttctgtctctctctccaccatttccagagtcatcatccctgtacagaaaaatttttcccacatgatttcaccataaattcattaaatatgatgcttacttgataatttctccaggttctttttttttttaattatactttaagttctagggtacatgtgcacaacctgcaggtttgttacatatgtatacatgtgccatgttggtgtgctgcacccattaactcgtcatttacattaggtatatctcctaatgctatccctcccccctacccctactccatgacaggtcccagtgtgtgatgttccccaccctgtgtccaagtgttctcattgttcagttcccacctatgagtgagaacatgcggtgtttggttttctgtccttgcgatagtttgctcagaatgatgtccttgctcactgatggacatttggttggctccaagtatttgctattgtaaatagtgccgcaataaacatacgtgtgcatgtgtctttatagtagcatgatttataatcctctgggtatatacccagtaatgggatggctggctcaaatggtatttctagttctagatcctagaggaatcgccacactgtcttccacaatgtttgaactagtttacagtcccatcaacagtgtaaaagtgttcctatttctctacatcctttccagcacctgttgtttccggactttaatgatcgccattctaactggtgtgagatggtatctcattgtggttttgatttgcatttctctgatggccagtgatgatgagcattttttcatgtgtcttttggctacataaatgtcttcttttgagaagtgtctgttcatatccttcacccactttttgatggggtcatttgattttttcttgtaaatttgtttaagttcttttagattctggatattagccctttgtcagatgggtagattgtaaaaattttctcccattccgtaggtttcctattcactctgatggtagtttcttttgctgtgcagaagctctttagtttaattagatcccatttgtcaattttggcttttgttgccattgcttttggtgttttagtcatgaagtccttgtccatgcctatgtcctgaatggtattgcctaggttttcttctagggtttttatggttttaggtctaacgtgtaagtctttaattcatcttgaattaatttttgtataaggtgtaaagaagggatccagtttcagctttctacatatggctagccagttttcccagcaccatttattaaatagagaatcctttccccatttcttgtttttgtcaggtttgtcaaagatcagatggttgtagatgtgtggtattgtttctgagggctctgttctgttccattggtctatatctctgttttggtaccagtaccatgctgttttggttactgtagccttgtaatatagtttgaagtcaggtagcgtgatgcctccagctttgttcttttggtttaggattgtcttggcgatgcgggctcttttttggttccatatgaactttaaagtagtttttttccaattctgtggagaaagtcattggtagcttgatggggatggcattgaatctataaattaccttgggtagtatggccattttcatgatattgattcttcctacccatgagaatggaatgttcttccatttgtttgcgtcctcttttatttccttgagcagtggtttgtagttctccttgaagaggtcttccacatcccttgtaagttggattcctaagtattttattctctttgaaacaattgtgaatgggagttcactcatgatttggctctctgtttgtctgttattggtgtataggaatgcttgtgatttttgcacattgattttgtatcctgagactttgctgaagttgcttatcagcttaaggagattttgggctgagatgatggggttttctaaatatacaatcatgtcatctgcaaacagagacaatttgacttcctctcttcctatttgaatatcctttatttctttctattgcctgattgccctggctagaacgtccaatactatgttgaataggagtggtgacagaggacatccttgttttgtgccagttttcaaagggaatgcttccagcttttgcccattcagtatgacattggctgtgggtttgtcgtgaatagctcttattattttgagatatgtcccatcaatacctagtttatttagagtttttagcacaaaggctgttgaattttgtcaaaggccttttctgcatctattgagataatcatggtttttgtctttgattctgtttatatgatggattatatttattgatttgcatatgttgaaccagccttgcatcccagggatgaagccaacttgatcatggtggataagctttttgatgttctgctggattcggtttgccagtattttactgaggatttttccatcgatcttcatcagggatattggcctgaaattctctttttttgttgtgtctctgtcaggctgtggtatcaggatgatgctggcctcataaaatgagttagggaggattccctctttttctattgattagaatagtttcagaatggtaccagctcctccttatacctctggtagaattcagctgtgaatccatctggtcctgatggatttttttggttggtaggctattaattattgcctcaatttcagagcctgttattggtctattaagagattcaacttcttcctggtttagtcctgggagggtgtgtgtgtccaggaatttataaatttcttttaggttttctagtttatttgcatagaagtgtttatagtgttctctgatggtagtttgtatttctgtgggattggtggtgatatcccctttatcaccttttattgcatctatttgattcttttctcttttcttctttattagtcttgctagtgatctatcaattttgttgatctttttaaaaaaccagctcctgggttcattgattttttgaaggagtttttctgtctctatctccttcagttctactctgatcttagttatttcttgtcttctgctagcttttgaatgtgtttgctcttgcttctctaaattgtgatgttagggtgtcaattttagatctttcctgctttctcttgtgggcatttagtgctataaatttccctctacacactgctttaaatgtgtcccagagattctggtatgttgtgtctttgttctcattggtttcaaagaacatctttatttctgccttcacttcgttaagtacccagtagtcactcaggagcaggttgctcagtttccatgtagttgagtggttctgagtgagtttcttaatcctgagttctagtttgaaagcactgtagtctgagaggcagtttgttataatttctgttcttttacatttgctgaggagtgctttacttccaactatgtagtcaatttttggaataagtgtgatgtggtgccgagaagaatgtatattctgttgatttggagtggagagttctgtagatgtctattaggtccgcttggtgcagagctgagttcaatttctggatatctttgttaattttctgtcttgttgatctgtctaatattgaccgtggggtgataaagtctcccattattattgtgtgggagtctaagtctctttgtaggtctctaaggacttgctttgtgaatctggtgctcctgtattaggtgcatatatttttaggatagttagctcttcttgttgaattgatccctttatcattatgtaatggccttctttgtctcttttgatctttgttggtttaaagtctgttttatcagagactaggattgcaactcctgcttttttttgctttccatttccttggtagatcttcctccatccctttattttgagcctatgtgcgtctctgcacatgagatgggtctgctgaatacagcacactgatgggtcttgactctttatccaatttgccagtccatgtcttttaactggagcatttagcccatttacatttaaggttaatattgttatgtgtgaatttgatcctgtcattatgatgttagctggttattttgctcgttagttgatgcagtttcttcctagcctcaatgatctttacaatttggcatgtttttgcagtggctggtactggttgttcctttccatgtttagtgcttccttcaggagctcttgtaaggcaggcctggtggtgacaaaatctctcagcatttgcttgtctgtaaaggattttatttctccttcacttatgaagcttagtttggctggatatgaaattctgggttgaaaattcttttctttaagaatgttgaatattggcccccactctcttctggcttgtagagtttctgccgaaagatgctgttagtctgatggacttccctttgtgggtaacctgccctttctctctcgctgcacttaatgttttttccttcatttcaactttggtgaatctgacaattatgtgtctttgagttactcttcttgaggagtatctttgcggcattctctgtatttcctgaatttgaatgctggcctgcctcactagattggggaagttctcctggataatatcctgcagagcgttttccaacttggttccattctccccatcactttcaggtacaccaatcagatgtagatttggtcttttcacatagtcccatatttcttggaggctttgttcatttctttttactcttttttctctaaacttctcttcttgcttcatttcattcatttgatcttcaatccctttcttccacttgattgaatcagctactgaagcttgtgcatgtgtcacatagttctcgtgccatggttttcagctccatcaggtcatttaaggtcttctctatgctgttttttctagttagccattcgtctaatgttttttcaaggtttttagcttctttgctaaaaggttcaaacatcctcctttagctcggaggagtttgttattactgatcatctgaagccttcttctctcaacttgtgaaagtcattctctgtccagctttgttccattgctggcgaggagctgcattcctttggaggagaagacgtgctctgatttttagaattttcagcttctctgctctggtttctccccatcttattggttttatctacctttggtctttgatgatggtgacgtacagatggggttttggtgtggatgttctttctctttgttagttttccttctaacagtcaggaccctcagctgcaggtctgttggagtttgctggaggtccactccagaccctgtttgcttgggtatcaccagcagaggctgcagaacagcaaatattgcagaacggcaaatgttgctccctgattgttcctctggaagcttcgtctcagaggggcacctggccgtatgaggtgtcagtcggcccctactgggaggtgcctcccagttaggctactcaggggtcaggaacccacttgaagaggcagactgtccattctcagatatcatattccatgctgggaggacccctactcttttcaaagctgtcagacagggacatttaagtctgcagaagtttctgctgtcttttgttcagctgtgccctgcccctagaggtggagtctacagaggcaggcaggcctccttgagctgcggtgggctccacccatttcgagcttcctggctgctttgtttacctactcaagtctcagcaatggtggacacccctcccccagcctcgctgctgctttgcagttcgatctcagactgctgtgctagcagtgagccaggctccgtgggcatgggaccctccgagccaggcctgggacataatctcctggtgtgccgtttgctaagaccattggaaaagcacagtattagggtggggagtgtcctgattttccaggtaccgtcagtcatggcttcccttggctaggaaagggaattccccaaccccttgtgcttcctgggtgaggtgatgccccaccctgctttggctcatgctccgtgggttgtacccactgtctgacaagccccagtgagatgaacccggtacctcagttggaaatgcagaaatcacccgtcttctgcatcactcacgctgggggctgtagactggagctgttcatatttggccatcttggaacctccctttccaagttctttattacagagtgggtcactgaaacttcatggaacaaattggaaattatcttcttaattaatgtcactgtctaccatgtatgggaatttggtaaatattatatggtttcaataacatagtagatagaacattgtcaaatctaaacttcagtgaattgtaacagatcccacctgaaattctaaagaaaacagaattctaattgaagaggttaaacttttacagggaatgtcaactgccatttgggtcctgtaaacaaaaaactgttttttaaaaaagtaaactttaaaagtattttcagatgacctcatttgctatccaagtggcttgagtatgcttgatgctaagacttctttgttacagactggagatgtgtgctactggggcagtgttgctctgtgacaaggaggcagaggatgagggcaaggttcgatgtgactgtgaattctgggtggctctggctatcgggagccttcattgattacagcaaaacagttgctttcctagggcaatagtgtctctgtcacccaggctggagttcagtggcatgatcaatcgctcactgtagcctcaacttcttagactcaagtaatcctcccacctcagcctcccaagtagctgaaactacaggtgtgcaccaccacacctaatttttttaatttttaagtttttgtagagacatggtctcactgtgttgcccaggttgatctcgaattcctgggctctagtgatcctcccgcctcggcctcccaaagtgttgggattacaaatgtgagccactgcacctggccctttgcaaccttcttgacaatgcattcctttattccctaactggaagtaacttctttctctttataaaattgtatctgtaccttttctgggtcatttctacctttatattctagttacgtatgtcctacctccctcctagggagggaggtaagtaagactggaaagtagacttcatgtgtgatgaatgaatgaacaaaaggaagtctaacatatggatatagtcaactggatgcaaattaaaaatttttaaatattgatttgcaagatttcattaaggtcaactcttaatagtttgtatcatatatgttaggaaccaaatattaataacttcttcagcattaccattatctttataggactgtctaaaatgagcagccatatctttaaactgtgttttctctgattacacgctcacaggtaaaacccaaaggggctgggaacaaacaagacttttttttttttctgtatgcctgaattatctgtactgttgcttgttttcccacctttggccatagaaacttagttctaacatgctacaatttttgcagttctttctcttagaaaaagaccacattgtctgaaatttcatccatttaagtaatcaagccttaaagttgaaggatcttggtcatgattaatctagacctacaaagtagtatcttaatggcactccttttagaaagttaggttccaggacacacatagctgcagtgtccacattttgtaagctccttcgttgtcacagccactctcttctctgtggctgatattctaaaactggcaacacatcctgatggtaaaagcttggttcaggagacaggtgacctactagctttatggcatttgacaggttacctaacctctctgacgcataattgcctcatctatataatggggataataatacccatcctgtctccttgtaaaaatcaaattagatgacgcctgtgaatgttctatagtctcttagacaaatgtaagttatgactacagcaagagtaaaagagcatgttgttatggacattctttcagtgaaatgtctaagacttgtgagtcacacttaaagctaaacttgatatctacttcattgattttctttttagttctatgtactatattgaatttcctgacagtggggctatgaaagccttcctagcattttatagatgtggttgaattaatggctgtaagccttaaagcagaattagacagcatcaatgaatttattaagtataaataaatatataatctgcttagcaatattacacagcctctttatcttatgtgtgataaagagtcatccgaaggttgaaaatgaagaattgtcctggaagctcttacttaatcttttattatttcctaatacagtatataaaattactcattgaaagcttagcagaataagaaacaagaagttaaaaggctgaaaactacaaattttgctattattattgttattacttcccaagtctcttattgatctgttagaaatagagctacacaggaaattgtaggacagttagtatgtggtagtgttatctgctttttaattattcaagtaaggttttattccattagaggaactcaagaagttggtcatggctgataattgctatctgtcaaattccttagagcagggatccgcaacacccaggccatggattgttaccagtccctggcctgttaggaaccaggctgcacagtaggaagtgagcggcgggtgagcaaacattgccatctgagctctgtctcctttcagatcagcagcagcattagattctcatagaagcatgagccctgttgtgaactgcacatgcaagggatctaggttgtgtgctccttatgagaatccaattccttatgataatttaactgatgatctaaggtggaaccatttcatcccaaaaccatccaccctgctactcccagaccgtggaaaaattgtcttccacaaaactggttcctgctgccaaaaaggttgggaccactgccttagagtttataatttggggttagcacagcctatatttacctgagaatttcaatgggttcactgatctttccaaatgaaaaggcttcttacgaaaattatatccaaactgtcttttctcttagtttaataaacctatcagtaagtttttactgagtactgctattacatttttctctgttaagcattatgggggctcagacatgatccattccctcaaagaacttacctttcagctgaagactgactagaatgagcaaatacggttaacaattaacaagtgagtaggccagctcggccaacatggtgaaaccctgtctctactaaaaatacaaaaattagccgggcatggtggtgggcgcctgtaatcccagctacctcctgctgaggcaggagaattgcttgaacccaggaggtggagattgcagtgagccgagattgcaccattgcactccagcctgggcgacagagcaagactctgtcttgggaaaaaaacaaaacaaaacaagtgagaagggaatcaagtactacgtaagatgtaatgtggaattttagggaaggaaggcagtgtatgctggagtaattagagaaaggggcatgcatgatttgatgcttgaactggatcatgaaggataagcaagattttggcagcaagtgagagggagagaggagtttgtcagaggaatggaacaagtcaggaggcagtaatgtgtacggcactccaaggactctgtcctgatcggagcagaagtgatgaagcattgagtagtttgagaaagttagctaagaagggtgagggcagatgttggagagagttgagtatcagagagaagacattagatttgagcagatagaacaaaaatgccattgccagtttttgtgtaagagaatagtattagggtggttacccaggaagtggtcatcagagttgaatggagcagaaagagtgtctgatacagcatcgggacgttgtggtcacaaaatgaggtggtgagggctgagccaagatggtggcagtgggatggataaaaagggatggccaggacaaatattttaaaggaaaaattaacaggacatctttactgactggattggaaggctatgcaggaaatatattgtcaaacttgattccaggatttctatcctatgcctgggttgcccaaaatatcagggaaccattgttagaaaaggtaggagataccactgttccaacaaaaagtattgagtttggtgttgcacccacttaacttcaaggccttacaagtgagtagacagttagttagaattgcagaagtgccactcagagagcagggcttgcaatgtggggttggactttgtcaccattgtgttaattcctaattctatgcagatgctcagcttgaggaatacccatgtttgggcttcagaatgaaagccaagtaatatttactcagatgccaattttccctctgaaatatttgctcatggaactgagagaacaatatataaagcattaattatttttctcataaagttattaataaaaagataagatcagtgaaaggcagagtaaactagaagccaagtatagaaaatggtatcattcaaagactcattactgtagtggtgaaaacaaaacaattttccaacagcttaagatgcctcagtattttggaccatttttaagtagttagtgtgggcacttagtaaatatgtattaaactatagttcattaattcttttttttttttttttgagatggagtttcactctggtcacccaggctgcatttttgctttcttagtgatatataaaatgtcgagtttcacaatgatggtatcttagatttgattaaatatggtattaaaaaatagctgatcacagaaagtctctaccagtgtgatgtagatggctaaagtattccacatttgcaaacttttattgacctaaataagaggtgccccttgggttgtttttatttggactgggaatattaggagaaagctttttcattcagtgtgtaagtacaatctaccagaaatagaaacccccatggacgatctatttctttgatggtacaggactcagaacattcacaaagatttagttgttagcggaatagacatctgtattttattcaaaccaattttcccttcctaatctgagaacattgtgcaatctaagcagttctaagcatgtttgctattcgtgcaaagtgagagtaaatctaaaagaaatttttttgtgtgtttagggatggtaataaagtctcttagtggttgaaaatgttatttcttacaaaagtggagaacatttgcttttcaataccagagttttcagccatttctgcattctgacctattgactggaggtaggttgcctttgaattcagtaaaacttcatgggcagaaacacagttccttttcctacttatttggatatcatgatggccattgcatgtatgtgtctttttgtaagtccatgcctcagaactgagaagtaggaataaaattagggtcagggctggggatgctactctttgctgctgagaaacacaatgcttcaggtaagtgattctgaagtccttcaccacctgacggtaaccttgggttggtccataggtatgttttcattttgcttgttcatccattttaattggcttcctagagcatgcttgtagatgtagagccaaatttagagtagagcaaccctctggcaaacaggaagagattaattttgtggtatgcttttaagggacttcccaggaaacttcaaaagcagaaaaagaagcactagctgcctattccaaaatgtgtaaaacaccactcagctttttaaaagtaggataaactcagagcgcgcgcacacgcgcgcgcgcacacacacacacacacacagagagaacatctctagtaaaaagaaaagttgagctttcttagctagatgtgtgtattagccagaaaaagccaaggagtgaagggttttagagaactggaggagataaagtggagtctgcatatgggaggcatttgaaatggacttaaatgtctttttaatgctgactttttcagttttctccttaccagacacattgttttcatgacattagccccaggcatagacacatcattaaaatgaacatgtcaaaaaatgatttctgtttagaaataagcaaaacattttcagttgtgaccacccaggtgtagaataaagaacagtggaattgggagccctgagttctaacataaactttcttcatgacataaggcaagtcttctatggcctttggtttccttacctgtaaaacaggatggctcaatgaaattatctttcttctttgctataatagagtatctctgtgggaagaggaaaaaaaaagtcaatttaaaggctccttatagttccccaactgctgttttattgtgctattcatgcctagacatcacatagctagaaaggcccatcagacccctcaggccactgctgttcctgtcacacattcctgcaaaggaccatgttgctaacttgaaaaaaattactattaattacacttgcagttgttgcttagtaacatttatgattttgtgtttctcgtgacagcatgagcagagatcattaaaaattaaacttacaaagctgctaaagtgggaagaaggagaacttgaagccacaatttttgcacttgcttagaagccatctaatctcaggtttatatgctagatcttgggggaaacactgcatgtctctggtttatattaaaccacatacagcacactactgacactgatttgtgtctggtgcagctggagtttatcaccaagacataaaaaaaccttgaccctgcagaatggcctggaattacaatcagatgggccacatggcatcccggtgaaagaaagccctaaccagttttctgtcttgtttctgctttctccctacagttccaccaggtgagaagagtgatgaccatccttttccttactatggttatttcatactttggttgcatgaaggctgcccccatgaaagaagcaaacatccgaggacaaggtggcttggcctacccaggtgtgcggacccatgggactctggagagcgtgaatgggcccaaggcaggttcaagaggcttgacatcattggctgacactttcgaacacgtgatagaagagctgttggatgaggaccagaaagttcggcccaatgaagaaaacaataaggacgcagacttgtacacgtccagggtgatgctcagtagtcaagtgcctttggagcctcctcttctctttctgctggaggaatacaaaaattacctagatgctgcaaacatgtccatgagggtccggcgccactctgaccctgcccgccgaggggagctgagcgtgtgtgacagtattagtgagtgggtaacggcagcagacaaaaagactgcagtggacatgtcgggcgggacggtcacagtccttgaaaaggtccctgtatcaaaaggccaactgaagcaatacttctacgagaccaagtgcaatcccatgggttacacaaaagaaggctgcaggggcatagacaaaaggcattggaactcccagtgccgaactacccagtcgtacgtgcgggcccttaccatggatagcaaaaagagaattggctggcgattcataaggatagacacttcttgtgtatgtacattgaccattaaaaggggaagatagtggatttatgttgtatagattagattatattgagacaaaaattatctatttgtatatatacataacagggtaaattattcagttaagaaaaaaataattttatgaactgcatgtataaatgaagtttatacagtacagtggttctacaatctatttattggacatgtccatgaccagaagggaaacagtcatttgcgcacaacttaaaaagtctgcattacattccttgataatgttgtggtttgttgccgttgccaagaactgaaaacataaaaagttaaaaaaaataataaattgcatgctgctttaattgtgaattgataataaactgtcctctttcagaaaacagaaaaaaaacacacacacacacaacaaaaatttgaaccaaaacattccgtttacattttagacagtaagtatcttcgttcttgttagtactatatctgttttactgcttttaacttctgatagcgttggaattaaaacaatgtcaaggtgctgttgtcattgctttactggcttaggggatgggggatggggggtatatttttgtttgttttgtgtttttttttcgtttgtttgttttgttttttagttcccacagggagtagagatggggaaagaattcctacaatatatattctggctgataaaagatacatttgtatgttgtgaagatgtttgcaatatcgatcagatgactagaaagtgaataaaaattaaggcaactgaacaaaaaaatgctcacactccacatcccgtgatgcacctcccaggccccgctcattctttgggcgttggtcagagtaagctgcttttgacggaaggacctatgtttgctcagaacacattctttccccccctccccctctggtctcctctttgttttgttttaaggaagaaaaatcagttgcgcgttctgaaatattttaccactgctgtgaacaagtgaacacattgtgtcacatcatgacactcgtataagcatggagaacagtgatttttttttagaacagaaaacaacaaaaaataaccccaaaatgaagattattttttatgaggagtgaacatttgggtaaatcatggctaagcttaaaaaaaactcatggtgaggcttaacaatgtcttgtaagcaaaaggtagagccctgtatcaacccagaaacacctagatcagaacaggaatccacattgccagtgacatgagactgaacagccaaatggaggctatgtggagttggcattgcatttaccggcagtgcgggaggaatttctgagtggccatcccaaggtctaggtggaggtggggcatggtatttgagacattccaaaacgaaggcctctgaaggacccttcagaggtggctctggaatgacatgtgtcaagctgcttggacctcgtgctttaagtgcctacattatctaactgtgctcaagaggttctcgactggaggaccacactcaagccgacttatgcccaccatcccacctctggataattttgcataaaattggattagcctggagcaggttgggagccaaatgtggcatttgtgatcatgagattgatgcaatgagatagaagatgtttgctacctgaacacttattgctttgaaactagacttgaggaaaccagggtttatcttttgagaacttttggtaagggaaaagggaacaggaaaagaaaccccaaactcaggccgaatgatcaaggggacccataggaaatcttgtccagagacaagacttcgggaaggtgtctggacattcagaacaccaagacttgaaggtgccttgctcaatggaagaggccaggacagagctgacaaaattttgctccccagtgaaggccacagcaaccttctgcccatcctgtctgttcatggagagggtccctgcctcacctctgccattttgggttaggagaagtcaagttgggagcctgaaatagtggttcttggaaaaatggatccccagtgaaaactagagctctaagcccattcagcccatttcacacctgaaaatgttagtgatcaccacttggaccagcatccttaagtatcagaaagccccaagcaattgctgcatcttagtagggtgagggataagcaaaagaggatgttcaccataacccaggaatgaagataccatcagcaaagaatttcaatttgttcagtctttcatttagagctagtctttcacagtaccatctgaatacctctttgaaagaaggaagactttacgtagtgtagatttgttttgtgttgtttgaaaatattatctttgtaattatttttaatatgtaaggaatgcttggaatatctgctgtatgtcaactttatgcagcttccttttgagggacaaatttaaaacaaacaaccccccatcacaaacttaaaggattgcaagggccagatctgttaagtggtttcataggagacacatccagcaattgtgtggtcagtggctcttttacccaataagatacatcacagtcacatgcttgatggtttatgttgacctaagatttattttgttaaaatctctctctgttgtgttcgttcttgttctgttttgttttgttttttaaagtcttgctgtggtctctttgtggcagaagtgtttcatgcatggcagcaggcctgttgcttttttatggcgattcccattgaaaatgtaagtaaatgtctgtggccttgttctctctatggtaaagatattattcaccatgtaaaacaaaaaacaatatttattgtattttagtatatttatataattatgttattgaaaaaaattggcattaaaacttaaccgcatcagaagcctattgtaaatacaagttctatttaagtgtactaattaacatataatatatgttttaaatatagaatttttaatgtttttaaatatattttcaaagtacataaaatctgggggttctgggtttttttctctttactgtaaaacaaacatgaaaacgtgttttattataaatacgtgtgttccttgctttaagactaatctgactagttttagtaattaaacagccctccagagaggatacttatttgaaagcctgggaggccaatcctgcagtctgtgagcttctgagaagttgtaggattggatctgtcttccatggtggaagatgggagtgtcattttctcggacacttgaaagttttacccctttgaagtgatatactttcatcagataccaaaccatgtatcctagcaacatcaggatccacgaatcacggctggctggctggctctatttgactataaaataactgttaaaaaaaatcaaagtaggtttacttagggataatgagaataaattggcccaaatttagaaagtcaagtactggggaaaaaagtaaaaaaagaaattcaatatttggagacaggtcacatatcctcggtttggaagtggtgccatttgcagtatgtatttgtatccatagcactgatttaatttttgtacgtggagcacacagattttatatcatagtacccacaatctaacagattgctaggatttctaaaaggatttgcctccgtgatggctgccaagccgctgggtaatttagttaaagtgtttaaagttatcactaaatcttagggaaataaatggaaggattttaaatcagagaaggggccattaaggaaaaaaagcatctgttcttactcttcagcctccccatttgaacactgacaacccatcccataacgtggtgaactatatctgtgcaatgtatcatttctatttctaaacatacacacatggtttcctcttgtattgtcttataaataaggatcaggaaagtcataacaaacattgacttgtgttgtgtatatggaaaaacagatcgaatgagatgaattactctatcctaatctgtccagtgaacttgaaaagtactctaagagaagcccttgactgccagtcatgacagcccagccatggacttagaactttgataaacttcaggcttgaccaattttcatagtcagaggactaaaatattttttaaatggttgagtaaaaaaagtaaaaattaaacatgacatccaaattacttgaagttaaacgagtttggtaaacatgactgaaagttttcattagaagatgaggttggagaaaaaaacaaaatagagacatctactaaattatcctacttggagttaataggagtaaccaatgtgtactgcattcattgagtaagcagttaaacttgtttaattactaagatgccaggaaataactcagatcattgctttgatctgttgtttttcaccatactgataagcctctgtggtcattagctgtgtctatgaaatctttttatgagctgtactaattcagtgaataataagacagttcgaaatgagaatctgaactaagtcttagaatgggtcagtgttaaattgttcctcattcatttaagtgacttctagatctggataaaatgtcaaacactttttgaactgcaacaaatggcttcaggcattgcctcagttcagccagcactcccaatagtgttaaggtttaaggttattgtaaaacatacttgtctccatcatgttctaacatcaagcctggtctacaagttaaagtagaaatggctgcatattttgataagccattgttaaataaagactgttaattgggataagaaacaatatacgtgtacataaatttaggaagatgaagcatttagcttgcaaaaagccattcacagatttgatccaacctcagaatgttgaccagcaaaattagtattttatggaacataggccatccttttagctgtgggtttttaaactgtggttttaaaggttggttggctgcttggtttggtgacaagcgggggtaatggttgggaatctgacttttgttggttacattgaactaactggtggttggtgaactccccacctaatagctaaacttagcaactagagtaggtgaagccactccaaaccagcccatgtttatggacattccttctaataaacacactgcctgcatgtctatccccaatcttgtgagtatgatcatccattctctcaattctggccaccatttgaattatttgtagggaaaaaaaagcaaactccttgctttttaatatgtgattatttgcagtaaattacttgaagactatgtttaaatattaacagaaaaagcactgtgatcttacacattatcataattgagaagacccatttctgtggcactctgtaggatttccataggcctttacctcacccccacaccctaattatttacaaggcacagaccaccagattaggagctccccagcctggcatttgcttttctaacaacaatcctgtgtgcttggtaatgtcagtagcatggaattgtaaaaagcaggccttccaattaaacctcaccacacaaacaataaacaagacctttgcatttaagtgtgagctgctattttatatctggaaaaacaaaagtcctttcctttagaaaaataagcttatctgtcctgaaaaaagcctcacacataatgttgtagttaatgacaggacttgtctcaagcctgtaaatgaccaaaaagtgttagttgaaatcctgagcttgaggtgtatgttctacatttagaaaggacataaagatgcttctgcagctctgcactttggtactgtactctatttcaaatggttccttagaaaccaggggctggtctgcatagaatggctgaacccaggggaaatatttttgtctggcttaagtgctcacaatttgaaaaaatccatgtcaagtactgcagtacacatttaaatttatttagtgaagctgcattctccattgagccctaacatttaaaaaatagttgctcaactgggatttggtgcatatcaggaaggaaagaggaaaaagacataaaatagaaaccttacccagcagagacctgctccaacagataccaagcagtgtttacttggagataacagtacccatactctcctccagttagactcatggaatgatctcaaagtgtgttctgcaaccagcatctgcatctctgggaactttttacaaatgcagactctcagttcccatcctagacttactaaataagaagctctgggggtagagtacaacagtctgagttttaacaacccctctaggtgattctgtgcccactcaaatttgaggatcattggactaaggggattaaacagcctttcacatgttctagataataggaagatagcacaacccaagaatttgaaactgtagatctgatcccaatcatgtcactacctatttgcttggccctgaaaacatcaaactatctatgtttgcatttcctaaacaacacaaaagtgatgggtgctcgcaggtggagcaaggcttagtgttgtaagagaagagtgcactgatggtttgaaagtgagcatgcaaatgtgagccaggaaagctcagtgcccttcatagtcaacaatttttttttctttcaaagcaacagcagtagtggattcaggacccagagcacgtagtcgtttgtaacacatttggaacgactgtgagaaatgagaagcaacatgcagcaaattaataaggaaaagattattccatctggggagctggtctctgcacatgccaacacagcccattctctgtgaaatagcgttttataggtcacaaattaaatcagcatcctgaattaatcagctattaacatccagctgaggaaatctaggttcacacctctagaatgaccagactataaatacaaagggcttcctcagactttgtggcaaagcttttctatattgtaggaactggtttctggaaatgaggacctgaacatagctattcccatctctgtgtgtatgtgtatgtgtgtgtgcacactcctgcacattttacaaggcaaattgcattagaagatttttctatttctaggatggaggggagggtgtccaaatgtattacccatccattaggcaatacagaagcctgaattctaacaagcctaccttgggagccaggtatcttggtagttcaatcatcaggttggccaaccctttccggtatctgaacctccatgccctcaactgtcagaggaagagggtgaacttgggggatctcccaagaggatggtcttggaggtaaatttcagttttaatattacaatttcattcttcctacttcattatttgccataaaaagagattaaagaggtttctgaagcacttaaaggctgggaagcattctgagataattcactgtgcatctcctgcctccctccatagctggtgtccttatatcatggtacttgccacaagattaaaagcaggaggcaccttgggttagtgtggcggttggggaggatgtgaccaaaggaaggtttctacttcatatgcaactataaaaatattaccaactgtctgacaagcaggcagaaaataccttggggaaggtgcccatatattcctcaagatgcaaattttctaccagggtctaaccttactttcaaagccaggcaatgtatttacctttgttttatgtcactcattcttactgtattacatggtgcctggcaaggagagattccttgtgttttgccaagttgcagggtcaggaaactctgcatgaaactgctggattagcatcctgtagagtcactgttaacagagctctttgaatgaaatgggtttgcatctctgttctttggggctttataaattcaccaaggatgtacggttcccaatctgtttcaccaccacctcccgagtactctggatagttcctcctcctgagaggatggccttgagaacaaaagtatctcataacaaatcacagcaacaccacattcagcagcagatttcctcagagaaacagcagatatttcagaatggtaaagaggtcattctgagtggagctttggctagcttaggagacaaacctcactggcatgccagtgtttgaaactcctcatttcagcaatccaactttggtttattcctggccctgagtcctttgtgcctgaatctctgagaaatctatgtttttgttcaatccacctctgctcccacttcatgccctgctttccttcctgatgacctcagagctctgcttcctctgggatccaacatctcaccactcagggggcacataatatagtaaagagtggagtctgaatcccaactctgctacaagagctgtgtgactgtaggcaagtcacttaacttctctgtgcctcagttcctcacctgcaaaggacaggtaaaaatattcccacttacctcatgggattttgtgacaattaaatgaggtaatacatataaagcacttaggaaagttacagacccatgagaaagcctcagaaaatgtttacaaactcttggaagtcactctgctgactggtaataagctgggctcatctagtacacacttcagagactcttttctcatattcagactcctggaagagatcccatctcatctgtgccattagcatccagggtcactttgtcttttctggaagactcagagagataactcttgtttacccactagcaataatactgcttggcagttaaactgtggccactacatacactcaagcaaatggaagagatatactacaataaagggtgtttttctagactgtacattccaaatgaagcccattattcctaagtgtctatcccagctgaatggcaatgactgaagccagggtgaaatggatgaactcacatagtctgaaagaaacaaggggccacagtcacatttctaaaaatagacatggcacatcaggaaaatcctacctcaacttctgccccatgtccttgacatacatttaacccattgcacaattatagtgactagtacttactataagcaggcagtgttcaaggcatcttatgcagattttctcactgcacaacaatccataaactaggtggtagttttagtactcccattttagagatgaaaaaaactaaggcacagagaattcaattaagttggcaaaggctgcaacacttgtgagtagcagggcagcctggatctggagccactcttaaaccactgaaaaatttaaaagtgcaaagggcattgagaacatacagaaggaaaaaaaaaaaaaaggccgtggttgtggggaggggggtggaatagctagttacatgtccaagggatttggcttccttcaaaaagggagaccaccagtggtgcttagaatttttagctttcagaagagtcctggattgatcttttaaggttaacatgcaaacagtctttcattgcatggaggcctttccaaaagtggatacaaccctactctgtgctgaaaaacctgaatgtagggtttctagagcttcatgtcagctatttccaatacttggatatggggcagttgtcacccctttaacctcatggacaatctgatgagcttcctgtgaattgctgggattgggcagataggcagagtgttgtggaaccacttgcaagacccaggagtgcccaatcctccctaggtcaatactttacagttattttgtgtttgggattggtggagaagagaaaggataatgactcaggcctgctgggtctgcaatagccctggccaccagcgccagccttctctcccccattcttccatgtatggctgacatcacttgtaagtctttgctgcacctcagcctcacaagtcatgtcaaggtcatgctccactgccaactgaattgaattgaaccaaaagatgaactcagtttgctatcttggctttcccactttcttaagaacagatcccattggtgatggggtagatcaggtagtaaagtcaaggtgctgaggactgatgtgtcccttgagttcagcagaagttagatgcgaaagggtgaagaatgttctataatgagtataaagagttctatcgatgggtttcagacagacgatccatatgcaaagaatcatatgtaaatcaagtaaagggtaagattaccctagcaattggttgaacacaaggacaagtgtttggcaataggcaatactgttacatccctattttgtaccagatgccatgctaaatgctttccatgctatctaaaataatcatgagatagatgtaatttgagagacaagaaaactgacaacacagtagcctaaataacttgcccaaggtcatacagttaataaatgatatagtcagatttgaagccacatctatataatcccaaggtctcgaattttaaccaccagactggtggctctcaatcctgacctgtacatttgaatcacatagggaatttaaaaaatatatctatacccagacgaggtaaatcagaatctctgggggtggggcccaggcatctgtatttcttttttttttttttttttttttgagacggagtctcgctctgtcgcccaggccggactgcggactgcagtggcgcaatctcggctcactgcaagctccgcttcccgggttcacgccattctcctgcctcagcctcccgagtagctgggactacaggcgcccgccaccgcgcccggctaattttttgtatttttagtagagacggtgtttcaccttgttagccaggatggtctcgatctcctgacctcatgatccacccacctcggcctcccaaagtgctgggattacaggcgtgagccaccgcgcccggcatctgtatttcttaaagatctttccagtggttttgttgaccagccagggtagaactgctgctccagattcttcttcctctaggtaaacaggagtcagaggtatcagagatttctgcccatgggactcagagccctaacctggtcccaaacttgggtgtgggattctaatgactgggaattaacaagacaggacgctagttctataggaaattgaatacaagtaggaccctagccatagaaacaagaataatgattttagatagtaaaatcaacattcagagtcagaatggacccaccagaaagctcaatctaacactgagctcctgaacgaggctccttaaatttctttagattccctgtgattagaaacaggagaggcactaatggctgcaggagggctgagtctacagatgaggatctctcatctacagatgaggatcaactgacccagtggtgaggagaagagagctctatgggcttctcacaggcaggtcgtcacctgtcccgcctccaagcaacctgctctgagccaacaacatgtttccacacatttcacactgcttggctcattctgctggactccaaagggctttactaagttgaagcaaagagaaaaaaaaacaatccatgttgactgtttggagtgttttctctgttttcagaagtgactgttagattagtatttggttttatcttctgcatcttctaatatttttatctcctccccatccctacctcaaactgccaagcagtgattcctgcttgacagtaggaaaaaacatctccgagtctcgcagccccttcctggagggcttgttttagaagcagtgcaggacatgcccagcttagccaggccacggggctaatcgaatttggcagatgctctgcgtcagcaggcaccagggtgctaatgccctgggtcagctggtgagagggtaagtgggcaaatgcctggcttcttccccgtgttttcaggacaggaatctgagtcccagtaatcactagcctatgggaccagaggctattttgggccttcttttatccaatggaaagttaggggtggtgacatctgaaactgccaaggagcatccagtttcacccttatccaggacatgtccctagaggaaatggaagcaatgtcaaggagaccaaaacgcgggtgtcagaacttccctttgtttttatttctgtgccgtttgttttcatccattcctttcactttcagctcacctttccactactctggttcaggtcttcattgcatctcgcctgggctatcacagcagccttccaacccatctctctacccccaatctctctaccccaacccacttccaacatcctcccatgatagcagaatgatctctctgaaggttcaatgacaataatgaacatgaaaacacttcgtaatacgttacacaaatagcaacacctacctatacacaaatgtaccgatgtggcaggagagacagaaatgctgtctttaatcactgttgactatgcaggtgtaaaggccagtgcattgcaagggaatgaaatcgatagactaagaggaatgtttctgggaaataatggtctaagttggcacacacagtattggaaccctcaaacgagtcaaaaaggcattcaaggtggacttgcctgcttggcaattgtatgtcactgtgataaacctgatgagagatgtaagatgtagatctaattatgcctatttttcaggtaactgaggctgagagaggcagtaatttgcagaagatcactcagtgagcatatagcagaactagaatataaattcagaggacatatgcttttcaagtgtgccatattgatacagatacattaatgtggatggatggatggatggatggatagatgaatggatgaatagagcatatgatttccctccctttaatatatcaaagggctatccattgctgacagagtaacaaattggtgatattggcattatggccttataggatgtagctttattttcctactttaatgtccagacaacttccaacacacttgacagtgcactccaaccctacttctccctattccctaaatgtaccttacactctacctcctctgcatctttgtccattccctgtctccctctctgattataaaatccctacccaaccataacccataatagggctgccagaaaaaacatcaaaccaaatgaataattgtttaatataagtgtgtgcaaatactctatggaacatatttatagtaaaaaatgatttgtattaatttaaattcaaatttcactgggtgtcctgcaattttaattgtaaaatctagcaaacccacacatcaggcagttgccccatgtataccctctggttttcttctgccatctcaaggtgggatttagcacttcttcgaatttttcatacacaattcactctcactgaataatgagcaatgtgtattttatggaagacttcttaataaatgtgaaaatgaagtttacattccataattgacattttatttttaacagttcttattaaaaatggccttatggctgggcatggaggctcaggcctgtaatctcaacacgttggcaggctgaagcaaaatgattgcttgagacctgaagtttgagaacagcctgggcaacatagcgagaccctgtctctacaaaaaaattaaaaatatatatatatagctgggtgtggtggcatgtgcctgtagtcccagttactcaggaggctgaagcgagagggtcacttgagcccacgagtttgaggctgcagtgagctaagatcatgccattacactccagcctgggtgacagattgagatcccatctctaaaagtcattaagtgtccttttgaccatttccctacacagcatttagtgctgatcacctgctctcactctattatgcagagaagctttcacttttcaaacctaggcactagtccacggcttgtttgtataccatggtagacttatcaaagcaaattttcgattaggcaggtttctcttaacaaatgaattttctatgaatataaaaaatgtttctatatgttaaaggttcaattgcatgaagcctttagcattttcttgggtaaaataattgctcccttactaagctgcagttatttgtataaactcttctagagcagtggacattttcattcacctgtgtacccactgcagttcacctagccatgtaccggaaagcagtcaacaagtgtctattaaattgaatgaatgcagtgtaaggccacattataagtgtatttagccctaagtggctacaacattgtttgcagcagccaaggaagggatcccagcagtcagggaaagcaacttgatagtttaattgagtaattctccaccctagttgcacattaggcatctggggagttttaaaaaaattatgaattgtagaccccatcctgcatccctgcatcaggtaaatcagaatctctgggagtgaagctcaggcatcaatattattttcaaagctcccaggttattttaccaggcaggaaaggttaaaaatgatgaacagttgctggagatttggactagtattcttctctgggtctaatccatgacagaagagagagaccaagataatcagagggagaaatacggatttctttttgcttttccctgttgtagatgttttagagtttacactgttctttcacatgcatgcacatcttgccacatcccacccccaccacatagtctggccactgagccttgagctgtgtgttcactttgtgagtgtgaagaacaacatggctacagccattctatgtaaatatgcaatcttagttttggcttggttgagtattgcttccccaggttcccaactccacttttactgttttaggttctggtttcaccaagaattcagtagctgtggtacttcccgggtatgagagaataaagaacttgtaaagtggaattggccagctttccacacccctaccttcactgcacaccaacctgcactgacatccagaggagaaccaagggaattgtttcctcctggtttggacacattccacttgaagctcctccaggcattgtgaagcagaattcccttcagtatatgtgactgcaaagagatgaatttttgaactggagactttgaaaataaggatgagcatgtacagagtgaaaacatgggcctcgagtcagcagattgaaatccctgaccttgctctgtacgtctctagccacataagctaagcaggtctcccctcac

SEQ ID NO: 954 - DNA, 91164 bp, Homo sapiens
gtgaggggagacctgcttagcttatgtggctagagacgtacagagcaaggtcagggatttcaatctgctgactcgaggcccatgttttcactctgtacatgctcatccttattttcaaagtctccagttcaaaaattcatctctttgcagtcacatatactgaagggaattctgcttcacaatgcctggaggagcttcaagtggaatgtgtccaaaccaggaggaaacaattcccttggttctcctctggatgtcagtgcaggttggtgtgcagtgaaggtaggggtgtggaaagctggccaattccactttacaagttctttattctctcatacccgggaagtaccacagctactgaattcttggtgaaaccagaacctaaaacagtaaaagtggagttgggaacctggggaagcaatactcaaccaagccaaaactaagattgcatatttacatagaatggctgtagccatgttgttcttcacactcacaaagtgaacacacagctcaaggctcagtggccagactatgtggtgggggtgggatgtggcaagatgtgcatgcatgtgaaagaacagtgtaaactctaaaacatctacaacagggaaaagcaaaaagaaatccgtatttctccctctgattatcttggtctctctcttctgtcatggattagacccagagaagaatactagtccaaatctccagcaactgttcatcatttttaacctttcctgcctggtaaaataacctgggagctttgaaaataatattgatgcctgagcttcactcccagagattctgatttacctgatgcagggatgcaggatggggtctacaattcataatttttttaaaactccccagatgcctaatgtgcaactagggtggagaattactcaattaaactatcaagttgctttccctgactgctgggatcccttccttggctgctgcaaacaatgttgtagccacttagggctaaatacacttataatgtggccttacactgcattcattcaatttaatagacacttgttgactgctttccggtacatggctaggtgaactgcagtgggtacacaggtgaatgaaaatgtccactgctctagaagagtttatacaaataactgcagcttagtaagggagcaattattttacccaagaaaatgctaaaggcttcatgcaattgaacctttaacatatagaaacattttttatattcatagaaaattcatttgttaagagaaacctgcctaatcgaaaatttgctttgataagtctaccatggtatacaaacaagccgtggactagtgcctaggtttgaaaagtgaaagcttctctgcataatagagtgagagcaggtgatcagcactaaatgctgtgtagggaaatggtcaaaaggacacttaatgacttttagagatgggatctcaatctgtcacccaggctggagtgtaatggcatgatcttagctcactgcagcctcaaactcgtgggctcaagtgaccctctcgcttcagcctcctgagtaactgggactacaggcacatgccaccacacccagctatatatatatatttttaatttttttgtagagacagggtctcgctatgttgcccaggctgttctcaaacttcaggtctcaagcaatcattttgcttcagcctgccaacgtgttgagattacaggcctgagcctccatgcccagccataaggccatttttaataagaactgttaaaaataaaatgtcaattatggaatgtaaacttcattttcacatttattaagaagtcttccataaaatacacattgctcattattcagtgagagtgaattgtgtatgaaaaattcgaagaagtgctaaatcccaccttgagatggcagaagaaaaccagagggtatacatggggcaactgcctgatgtgtgggtttgctagattttacaattaaaattgcaggacacccagtgaaatttgaatttaaattaatacaaatcattttttactataaatatgttccatagagtatttgcacacacttatattaaacaattattcatttggtttgatgttttttctggcagccctattatgggttatggttgggtagggattttataatcagagagggagacagggaatggacaaagatgcagaggaggtagagtgtaaggtacatttagggaatagggagaagtagggttggagtgcactgtcaagtgtgttggaagttgtctggacattaaagtaggaaaataaagctacatcctataaggccataatgccaatatcaccaatttgttactctgtcagcaatggatagccctttgatatattaaagggagggaaatcatatgctctattcatccattcatctatccatccatccatccatccatccacattaatgtatctgtatcaatatggcacacttgaaaagcatatgtcctctgaatttatattctagttctgctatatgctcactgagtgatcttctgcaaattactgcctctctcagcctcagttacctgaaaaataggcataattagatctacatcttacatctctcatcaggtttatcacagtgacatacaattgccaagcaggcaagtccaccttgaatgcctttttgactcgtttgagggttccaatactgtgtgtgccaacttagaccattatttcccagaaacattcctcttagtctatcgatttcattcccttgcaatgcactggcctttacacctgcatagtcaacagtgattaaagacagcatttctgtctctcctgccacatcggtacatttgtgtataggtaggtgttgctatttgtgtaacgtattacgaagtgttttcatgttcattattgtcattgaaccttcagagagatcattctgctatcatgggaggatgttggaagtgggttggggtagagagattgggggtagagagatgggttggaaggctgctgtgatagcccaggcgagatgcaatgaagacctgaaccagagtagtggaaaggtgagctgaaagtgaaaggaatggatgaaaacaaacggcacagaaataaaaacaaagggaagttctgacacccgcgttttggtctccttgacattgcttccatttcctctagggacatgtcctggataagggtgaaactggatgctccttggcagtttcagatgtcaccacccctaactttccattggataaaagaaggcccaaaatagcctctggtcccataggctagtgattactgggactcagattcctgtcctgaaaacacggggaagaagccaggcatttgcccacttaccctctcaccagctgacccagggcattagcaccctggtgcctgctgacgcagagcatctgccaaattcgattagccccgtggcctggctaagctgggcatgtcctgcactgcttctaaaacaagccctccaggaaggggctgcgagactcggagatgttttttcctactgtcaagcaggaatcactgcttggcagtttgaggtagggatggggaggagataaaaatattagaagatgcagaagataaaaccaaatactaatctaacagtcacttctgaaaacagagaaaacactccaaacagtcaacatggattgtttttttttctctttgcttcaacttagtaaagccctttggagtccagcagaatgagccaagcagtgtgaaatgtgtggaaacatgttgttggctcagagcaggttgcttggaggcgggacaggtgacgacctgcctgtgagaagcccatagagctctcttctcctcaccactgggtcagttgatcctcatctgtagatgagagatcctcatctgtagactcagccctcctgcagccattagtgcctctcctgtttctaatcacagggaatctaaagaaatttaaggagcctcgttcaggagctcagtgttagattgagctttctggtgggtccattctgactctgaatgttgattttactatctaaaatcattattcttgtttctatggctagggtcctacttgtattcaatttcctatagaactagcgtcctgtcttgttaattcccagtcattagaatcccacacccaagtttgggaccaggttagggctctgagtcccatgggcagaaatctctgatacctctgactcctgtttacctagaggaagaagaatctggagcagcagttctaccctggctggtcaacaaaaccactggaaagatctttaagaaatacagatgccgggcgcggtggctcacgcctgtaatcccagcactttgggaggccgaggtgggtggatcatgaggtcaggagatcgagaccatcctggctaacaaggtgaaacaccgtctctactaaaaatacaaaaaattagccgggcgcggtggcgggcgcctgtagtcccagctactcgggaggctgaggcaggagaatggcgtgaacccgggaagcggagcttgcagtgagccgagattgcgccactgcagtccgcagtccggcctgggcgacagagcgagactccgtctcaaaaaaaaaaaaaaaaaaaaaagaaatacagatgcctgggccccacccccagagattctgatttacctcgtctgggtatagatatattttttaaattccctatgtgattcaaatgtacaggtcaggattgagagccaccagtctggtggttaaaattcgagaccttgggattatatagatgtggcttcaaatctgactatatcatttattaactgtatgaccttgggcaagttatttaggctactgtgttgtcagttttcttgtctctcaaattacatctatctcatgattattttagatagcatggaaagcatttagcatggcatctggtacaaaatagggatgtaacagtattgcctattgccaaacacttgtccttgtgttcaaccaattgctagggtaatcttaccctttacttgatttacatatgattctttgcatatggatcgtctgtctgaaacccatcgatagaactctttatactcattatagaacattcttcaccctttcgcatctaacttctgctgaactcaagggacacatcagtcctcagcaccttgactttactacctgatctaccccatcaccaatgggatctgttcttaagaaagtgggaaagccaagatagcaaactgagttcatcttttggttcaattcaattcagttggcagtggagcatgaccttgacatgacttgtgaggctgaggtgcagcaaagacttacaagtgatgtcagccatacatggaagaatgggggagagaaggctggcgctggtggccagggctattgcagacccagcaggcctgagtcattatcctttctcttctccaccaatcccaaacacaaaataactgtaaagtattgacctagggaggattgggcactcctgggtcttgcaagtggttccacaacactctgcctatctgcccaatcccagcaattcacaggaagctcatcagattgtccatgaggttaaaggggtgacaactgccccatatccaagtattggaaatagctgacatgaagctctagaaaccctacattcaggtttttcagcacagagtagggttgtatccacttttggaaaggcctccatgcaatgaaagactgtttgcatgttaaccttaaaagatcaatccaggactcttctgaaagctaaaaattctaagcaccactggtggtctccctttttgaaggaagccaaatcccttggacatgtaactagctattccacccccctccccacaaccacggccttttttttttttttccttctgtatgttctcaatgccctttgcacttttaaatttttcagtggtttaagagtggctccagatccaggctgccctgctactcacaagtgttgcagcctttgccaacttaattgaattctctgtgccttagtttttttcatctctaaaatgggagtactaaaactaccacctagtttatggattgttgtgcagtgagaaaatctgcataagatgccttgaacactgcctgcttatagtaagtactagtcactataattgtgcaatgggttaaatgtatgtcaaggacatggggcagaagttgaggtaggattttcctgatgtgccatgtctatttttagaaatgtgactgtggccccttgtttctttcagactatgtgagttcatccatttcaccctggcttcagtcattgccattcagctgggatagacacttaggaataatgggcttcatttggaatgtacagtctagaaaaacaccctttattgtagtatatctcttccatttgcttgagtgtatgtagtggccacagtttaactgccaagcagtattattgctagtgggtaaacaagagttatctctctgagtcttccagaaaagacaaagtgaccctggatgctaatggcacagatgagatgggatctcttccaggagtctgaatatgagaaaagagtctctgaagtgtgtactagatgagcccagcttattaccagtcagcagagtgacttccaagagtttgtaaacattttctgaggctttctcatgggtctgtaactttcctaagtgctttatatgtattacctcatttaattgtcacaaaatcccatgaggtaagtgggaatatttttacctgtcctttgcaggtgaggaactgaggcacagagaagttaagtgacttgcctacagtcacacagctcttgtagcagagttgggattcagactccactctttactatattatgtgccccctgagtggtgagatgttggatcccagaggaagcagagctctgaggtcatcaggaaggaaagcagggcatgaagtgggagcagaggtggattgaacaaaaacatagatttctcagagattcaggcacaaaggactcagggccaggaataaaccaaagttggattgctgaaatgaggagtttcaaacactggcatgccagtgaggtttgtctcctaagctagccaaagctccactcagaatgacctctttaccattctgaaatatctgctgtttctctgaggaaatctgctgctgaatgtggtgttgctgtgatttgttatgagatacttttgttctcaaggccatcctctcaggaggaggaactatccagagtactcgggaggtggtggtgaaacagattgggaaccgtacatccttggtgaatttataaagccccaaagaacagagatgcaaacccatttcattcaaagagctctgttaacagtgactctacaggatgctaatccagcagtttcatgcagagtttcctgaccctgcaacttggcaaaacacaaggaatctctccttgccaggcaccatgtaatacagtaagaatgagtgacataaaacaaaggtaaatacattgcctggctttgaaagtaaggttagaccctggtagaaaatttgcatcttgaggaatatatgggcaccttccccaaggtattttctgcctgcttgtcagacagttggtaatatttttatagttgcatatgaagtagaaaccttcctttggtcacatcctccccaaccgccacactaacccaaggtgcctcctgcttttaatcttgtggcaagtaccatgatataaggacaccagctatggagggaggcaggagatgcacagtgaattatctcagaatgcttcccagcctttaagtgcttcagaaacctctttaatctctttttatggcaaataatgaagtaggaagaatgaaattgtaatattaaaactgaaatttacctccaagaccatcctcttgggagatcccccaagttcaccctcttcctctgacagttgagggcatggaggttcagataccggaaagggttggccaacctgatgattgaactaccaagatacctggctcccaaggtaggcttgttagaattcaggcttctgtattgcctaatggatgggtaatacatttggacaccctcccctccatcctagaaatagaaaaatcttctaatgcaatttgccttgtaaaatgtgcaggagtgtgcacacacacatacacatacacacagagatgggaatagctatgttcaggtcctcatttccagaaaccagttcctacaatatagaaaagctttgccacaaagtctgaggaagccctttgtatttatagtctggtcattctagaggtgtgaacctagatttcctcagctggatgttaatagctgattaattcaggatgctgatttaatttgtgacctataaaacgctatttcacagagaatgggctgtgttggcatgtgcagagaccagctccccagatggaataatcttttccttattaatttgctgcatgttgcttctcatttctcacagtcgttccaaatgtgttacaaacgactacgtgctctgggtcctgaatccactactgctgttgctttgaaagaaaaaaaaattgttgactatgaagggcactgagctttcctggctcacatttgcatgctcactttcaaaccatcagtgcactcttctcttacaacactaagccttgctccacctgcgagcacccatcacttttgtgttgtttaggaaatgcaaacatagatagtttgatgttttcagggccaagcaaataggtagtgacatgattgggatcagatctacagtttcaaattcttgggttgtgctatcttcctattatctagaacatgtgaaaggctgtttaatccccttagtccaatgatcctcaaatttgagtgggcacagaatcacctagaggggttgttaaaactcagactgttgtactctacccccagagcttcttatttagtaagtctaggatgggaactgagagtctgcatttgtaaaaagttcccagagatgcagatgctggttgcagaacacactttgagatcattccatgagtctaactggaggagagtatgggtactgttatctccaagtaaacactgcttggtatctgttggagcaggtctctgctgggtaaggtttctattttatgtctttttcctctttccttcctgatatgcaccaaatcccagttgagcaactattttttaaatgttagggctcaatggagaatgcagcttcactaaataaatttaaatgtgtactgcagtacttgacatggattttttcaaattgtgagcacttaagccagacaaaaatatttcccctgggttcagccattctatgcagaccagcccctggtttctaaggaaccatttgaaatagagtacagtaccaaagtgcagagctgcagaagcatctttatgtcctttctaaatgtagaacatacacctcaagctcaggatttcaactaacactttttggtcatttacaggcttgagacaagtcctgtcattaactacaacattatgtgtgaggcttttttcaggacagataagcttatttttctaaaggaaaggacttttgtttttccagatataaaatagcagctcacacttaaatgcaaaggtcttgtttattgtttgtgtggtgaggtttaattggaaggcctgctttttacaattccatgctactgacattaccaagcacacaggattgttgttagaaaagcaaatgccaggctggggagctcctaatctggtggtctgtgccttgtaaataattagggtgtgggggtgaggtaaaggcctatggaaatcctacagagtgccacagaaatgggtcttctcaattatgataatgtgtaagatcacagtgctttttctgttaatatttaaacatagtcttcaagtaatttactgcaaataatcacatattaaaaagcaaggagtttgcttttttttccctacaaataattcaaatggtggccagaattgagagaatggatgatcatactcacaagattggggatagacatgcaggcagtgtgtttattagaaggaatgtccataaacatgggctggtttggagtggcttcacctactctagttgctaagtttagctattaggtggggagttcaccaaccaccagttagttcaatgtaaccaacaaaagtcagattcccaaccattacccccgcttgtcaccaaaccaagcagccaaccaacctttaaaaccacagtttaaaaacccacagctaaaaggatggcctatgttccataaaatactaattttgctggtcaacattctgaggttggatcaaatctgtgaatggctttttgcaagctaaatgcttcatcttcctaaatttatgtacacgtatattgtttcttatcccaattaacagtctttatttaacaatggcttatcaaaatatgcagccatttctactttaacttgtagaccaggcttgatgttagaacatgatggagacaagtatgttttacaataaccttaaaccttaacactattgggagtgctggctgaactgaggcaatgcctgaagccatttgttgcagttcaaaaagtgtttgacattttatccagatctagaagtcacttaaatgaatgaggaacaatttaacactgacccattctaagacttagttcagattctcatttcgaactgtcttattattcactgaattagtacagctcataaaaagatttcatagacacagctaatgaccacagaggcttatcagtatggtgaaaaacaacagatcaaagcaatgatctgagttatttcctggcatcttagtaattaaacaagtttaactgcttactcaatgaatgcagtacacattggttactcctattaactccaagtaggataatttagtagatgtctctattttgtttttttctccaacctcatcttctaatgaaaactttcagtcatgtttaccaaactcgtttaacttcaagtaatttggatgtcatgtttaatttttactttttttactcaaccatttaaaaaatattttagtcctctgactatgaaaattggtcaagcctgaagtttatcaaagttctaagtccatggctgggctgtcatgactggcagtcaagggcttctcttagagtacttttcaagttcactggacagattaggatagagtaattcatctcattcgatctgtttttccatatacacaacacaagtcaatgtttgttatgactttcctgatccttatttataagacaatacaagaggaaaccatgtgtgtatgtttagaaatagaaatgatacattgcacagatatagttcaccacgttatgggatgggttgtcagtgttcaaatggggaggctgaagagtaagaacagatgctttttttccttaatggccccttctctgatttaaaatccttccatttatttccctaagatttagtgataactttaaacactttaactaaattacccagcggcttggcagccatcacggaggcaaatccttttagaaatcctagcaatctgttagattgtgggtactatgatataaaatctgtgtgctccacgtacaaaaattaaatcagtgctatggatacaaatacatactgcaaatggcaccacttccaaaccgaggatatgtgacctgtctccaaatattgaatttctttttttacttttttccccagtacttgactttctaaatttgggccaatttattctcattatccctaagtaaacctactttgattttttttaacagttattttatagtcaaatagagccagccagccagccgtgattcgtggatcctgatgttgctaggatacatggtttggtatctgatgaaagtatatcacttcaaaggggtaaaactttcaagtgtccgagaaaatgacactcccatcttccaccatggaagacagatccaatcctacaacttctcagaagctcacagactgcaggattggcctcccaggctttcaaataagtatcctctctggagggctgtttaattactaaaactagtcagattagtcttaaagcaaggaacacacgtatttataataaaacacgttttcatgtttgttttacagtaaagagaaaaaaacccagaacccccagattttatgtactttgaaaatatatttaaaaacattaaaaattctatatttaaaacatatattatatgttaattagtacacttaaatagaacttgtatttacaataggcttctgatgcggttaagttttaatgccaatttttttcaataacataattatataaatatactaaaatacaataaatattgttttttgttttacatggtgaataatatctttaccatagagagaacaaggccacagacatttacttacattttcaatgggaatcgccataaaaaagcaacaggcctgctgccatgcatgaaacacttctgccacaaagagaccacagcaagactttaaaaaacaaaacaaaacagaacaagaacgaacacaacagagagagattttaacaaaataaatcttaggtcaacataaaccatcaagcatgtgactgtgatgtatcttattgggtaaaagagccactgaccacacaattgctggatgtgtctcctatgaaaccacttaacagatctggcccttgcaatcctttaagtttgtgatggggggttgtttgttttaaatttgtccctcaaaaggaagctgcataaagttgacatacagcagatattccaagcattccttacatattaaaaataattacaaagataatattttcaaacaacacaaaacaaatctacactacgtaaagtcttccttctttcaaagaggtattcagatggtactgtgaaagactagctctaaatgaaagactgaacaaattgaaattctttgctgatggtatcttcattcctgggttatggtgaacatcctcttttgcttatccctcaccctactaagatgcagcaattgcttggggctttctgatacttaaggatgctggtccaagtggtgatcactaacattttcaggtgtgaaatgggctgaatgggcttagagctctagttttcactggggatccatttttccaagaaccactatttcaggctcccaacttgacttctcctaacccaaaatggcagaggtgaggcagggaccctctccatgaacagacaggatgggcagaaggttgctgtggccttcactggggagcaaaattttgtcagctctgtcctggcctcttccattgagcaaggcaccttcaagtcttggtgttctgaatgtccagacaccttcccgaagtcttgtctctggacaagatttcctatgggtccccttgatcattcggcctgagtttggggtttcttttcctgttcccttttcccttaccaaaagttctcaaaagataaaccctggtttcctcaagtctagtttcaaagcaataagtgttcaggtagcaaacatcttctatctcattgcatcaatctcatgatcacaaatgccacatttggctcccaacctgctccaggctaatccaattttatgcaaaattatccagaggtgggatggtgggcataagtcggcttgagtgtggtcctccagtcgagaacctcttgagcacagttagataatgtaggcacttaaagcacgaggtccaagcagcttgacacatgtcattccagagccacctctgaagggtccttcagaggccttcgttttggaatgtctcaaataccatgccccacctccacctagaccttgggatggccactcagaaattcctcccgcactgccggtaaatgcaatgccaactccacatagcctccatttggctgttcagtctcatgtcactggcaatgtggattcctgttctgatctaggtgtttctgggttgatacagggctctaccttttgcttacaagacattgttaagcctcaccatgagttttttttaagcttagccatgatttacccaaatgttcactcctcataaaaaataatcttcattttggggttattttttgttgttttctgttctaaaaaaaaatcactgttctccatgcttatacgagtgtcatgatgtgacacaatgtgttcacttgttcacagcagtggtaaaatatttcagaacgcgcaactgatttttcttccttaaaacaaaacaaagaggagaccagagggggagggggggaaagaatgtgttctgagcaaacataggtccttccgtcaaaagcagcttactctgaccaacgcccaaagaatgagcggggcctgggaggtgcatcacgggatgtggagtgtgagcatttttttgttcagttgccttaatttttattcactttctagtcatctgatcgatattgcaaacatcttcacaacatacaaatgtatcttttatcagccagaatatatattgtaggaattctttccccatctctactccctgtgggaactaaaaaacaaaacaaacaaacgaaaaaaaaacacaaaacaaacaaaaatataccccccatcccccatcccctaagccagtaaagcaatgacaacagcaccttgacattgttttaattccaacgctatcagaagttaaaagcagtaaaacagatatagtactaacaagaacgaagatacttactgtctaaaatgtaaacggaatgttttggttcaaatttttgttgtgtgtgtgtgtgttttttttctgttttctgaaagaggacagtttattatcaattcacaattaaagcagcatgcaatttattattttttttaactttttatgttttcagttcttggcaacggcaacaaaccacaacattatcaaggaatgtaatgcagactttttaagttgtgcgcaaatgactgtttcccttctggtcatggacatgtccaataaatagattgtagaaccactgtactgtataaacttcatttatacatgcagttcataaaattatttttttcttaactgaataatttaccctgttatgtatatatacaaatagataatttttgtctcaatataatctaatctatacaacataaatccactatcttccccttttaatggtcaatgtacatacacaagaagtgtctatccttatgaatcgccagccaattctctttttgctatccatggtaagggcccgcacgtacgactgggtagttcggcactgggagttccaatgccttttgtctatgcccctgcagccttcttttgtgtaacccatgggattgcacttggtctcgtagaagtattgcttcagttggccttttgatacagggaccttttcaaggactgtgaccgtcccgcccgacatgtccactgcagtctttttgtctgctgccgttacccactcactaatactgtcacacacgctcagctcccctcggcgggcagggtcagagtggcgccggaccctcatggacatgtttgcagcatctaggtaatttttgtattcctccagcagaaagagaagaggaggctccaaaggcacttgactactgagcatcaccctggacgtgtacaagtctgcgtccttattgttttcttcattgggccgaactttctggtcctcatccaacagctcttctatcacgtgttcgaaagtgtcagccaatgatgtcaagcctcttgaacctgccttgggcccattcacgctctccagagtcccatgggtccgcacacctgggtaggccaagccaccttgtcctcggatgtttgcttctttcatgggggcagccttcatgcaaccaaagtatgaaataaccatagtaaggaaaaggatggtcatcactcttctcacctggtggaactgtagggagaaagcagaaacaagacagaaaactggttagggctttctttcaccgggatgccatgtggcccatctgattgtaattccaggccattctgcagggtcaaggtttttttatgtcttggtgataaactccagctgcaccagacacaaatcagtgtcagtagtgtgctgtatgtggtttaatataaaccagagacatgcagtgtttcccccaagatctagcatataaacctgagattagatggcttctaagcaagtgcaaaaattgtggcttcaagttctccttcttcccactttagcagctttgtaagtttaatttttaatgatctctgctcatgctgtcacgagaaacacaaaatcataaatgttactaagcaacaactgcaagtgtaattaatagtaatttttttcaagttagcaacatggtcctttgcaggaatgtgtgacaggaacagcagtggcctgaggggtctgatgggcctttctagctatgtgatgtctaggcatgaatagcacaataaaacagcagttggggaactataaggagcctttaaattgactttttttttcctcttcccacagagatactctattatagcaaagaagaaagataatttcattgagccatcctgttttacaggtaaggaaaccaaaggccatagaagacttgccttatgtcatgaagaaagtttatgttagaactcagggctcccaattccactgttctttattctacacctgggtggtcacaactgaaaatgttttgcttatttctaaacagaaatcattttttgacatgttcattttaatgatgtgtctatgcctggggctaatgtcatgaaaacaatgtgtctggtaaggagaaaactgaaaaagtcagcattaaaaagacatttaagtccatttcaaatgcctcccatatgcagactccactttatctcctccagttctctaaaacccttcactccttggctttttctggctaatacacacatctagctaagaaagctcaacttttctttttactagagatgttctctctgtgtgtgtgtgtgtgtgtgcgcgcgcgcgtgtgcgcgcgctctgagtttatcctacttttaaaaagctgagtggtgttttacacattttggaataggcagctagtgcttctttttctgcttttgaagtttcctgggaagtcccttaaaagcataccacaaaattaatctcttcctgtttgccagagggttgctctactctaaatttggctctacatctacaagcatgctctaggaagccaattaaaatggatgaacaagcaaaatgaaaacatacctatggaccaacccaaggttaccgtcaggtggtgaaggacttcagaatcacttacctgaagcattgtgtttctcagcagcaaagagtagcatccccagccctgaccctaattttattcctacttctcagttctgaggcatggacttacaaaaagacacatacatgcaatggccatcatgatatccaaataagtaggaaaaggaactgtgtttctgcccatgaagttttactgaattcaaaggcaacctacctccagtcaataggtcagaatgcagaaatggctgaaaactctggtattgaaaagcaaatgttctccacttttgtaagaaataacattttcaaccactaagagactttattaccatccctaaacacacaaaaaaatttcttttagatttactctcactttgcacgaatagcaaacatgcttagaactgcttagattgcacaatgttctcagattaggaagggaaaattggtttgaataaaatacagatgtctattccgctaacaactaaatctttgtgaatgttctgagtcctgtaccatcaaagaaatagatcgtccatgggggtttctatttctggtagattgtacttacacactgaatgaaaaagctttctcctaatattcccagtccaaataaaaacaacccaaggggcacctcttatttaggtcaataaaagtttgcaaatgtggaatactttagccatctacatcacactggtagagactttctgtgatcagctattttttaataccatatttaatcaaatctaagataccatcattgtgaaactcgacattttatatatcactaagaaagcaaaaatgcagcctgggtgaccagagtgaaactccatctcaaaaaaaaaaaaaaaagaattaatgaactatagtttaatacatatttactaagtgcccacactaactacttaaaaatggtccaaaatactgaggcatcttaagctgttggaaaattgttttgttttcaccactacagtaatgagtctttgaatgataccattttctatacttggcttctagtttactctgcctttcactgatcttatctttttattaataactttatgagaaaaataattaatgctttatatattgttctctcagttccatgagcaaatatttcagagggaaaattggcatctgagtaaatattacttggctttcattctgaagcccaaacatgggtattcctcaagctgagcatctgcatagaattaggaattaacacaatggtgacaaagtccaaccccacattgcaagccctgctctctgagtggcacttctgcaattctaactaactgtctactcacttgtaaggccttgaagttaagtgggtgcaacaccaaactcaatactttttgttggaacagtggtatctcctaccttttctaacaatggttccctgatattttgggcaacccaggcataggatagaaatcctggaatcaagtttgacaatatatttcctgcatagccttccaatccagtcagtaaagatgtcctgttaatttttcctttaaaatatttgtcctggccatccctttttatccatcccactgccaccatcttggctcagccctcaccacctcattttgtgaccacaacgtcccgatgctgtatcagacactctttctgctccattcaactctgatgaccacttcctgggtaaccaccctaatactattctcttacacaaaaactggcaatggcatttttgttctatctgctcaaatctaatgtcttctctctgatactcaactctctccaacatctgccctcacccttcttagctaactttctcaaactactcaatgcttcatcacttctgctccgatcaggacagagtccttggagtgccgtacacattactgcctcctgacttgttccattcctctgacaaactcctctctccctctcacttgctgccaaaatcttgcttatccttcatgatccagttcaagcatcaaatcatgcatgcccctttctctaattactccagcatacactgccttccttccctaaaattccacattacatcttacgtagtacttgattcccttctcacttgttttgttttgtttttttcccaagacagagtcttgctctgtcgcccaggctggagtgcaatggtgcaatctcggctcactgcaatctccacctcctgggttcaagcaattctcctgcctcagcaggaggtagctgggattacaggcgcccaccaccatgcccggctaatttttgtatttttagtagagacagggtttcaccatgttggccgagctggcctactcacttgttaattgttaaccgtatttgctcattctagtcagtcttcagctgaaaggtaagttctttgagggaatggatcatgtctgagcccccataatgcttaacagagaaaaatgtaatagcagtactcagtaaaaacttactgataggtttattaaactaagagaaaagacagtttggatataattttcgtaagaagccttttcatttggaaagatcagtgaacccattgaaattctcaggtaaatataggctgtgctaaccccaaattataaactctaaggcagtggtcccaacctttttggcagcaggaaccagttttgtggaagacaatttttccacggtctgggagtagcagggtggatggttttgggatgaaatggttccaccttagatcatcagttaaattatcataaggaattggattctcataaggagcacacaacctagatcccttgcatgtgcagttcacaacagggctcatgcttctatgagaatctaatgctgctgctgatctgaaaggagacagagctcagatggcaatgtttgctcacccgccgctcacttcctactgtgcagcctggttcctaacaggccagggactggtaacaatccatggcctgggtgttgcggatccctgctctaaggaatttgacagatagcaattatcagccatgaccaacttcttgagttcctctaatggaataaaaccttacttgaataattaaaaagcagataacactaccacatactaactgtcctacaatttcctgtgtagctctatttctaacagatcaataagagacttgggaagtaataacaataataatagcaaaatttgtagttttcagccttttaacttcttgtttcttattctgctaagctttcaatgagtaattttatatactgtattaggaaataataaaagattaagtaagagcttccaggacaattcttcattttcaaccttcggatgactctttatcacacataagataaagaggctgtgtaatattgctaagcagattatatatttatttatacttaataaattcattgatgctgtctaattctgctttaaggcttacagccattaattcaaccacatctataaaatgctaggaaggctttcatagccccactgtcaggaaattcaatatagtacatagaactaaaaagaaaatcaatgaagtagatatcaagtttagctttaagtgtgactcacaagtcttagacatttcactgaaagaatgtccataacaacatgctcttttactcttgctgtagtcataacttacatttgtctaagagactatagaacattcacaggcgtcatctaatttgatttttacaaggagacaggatgggtattattatccccattatatagatgaggcaattatgcgtcagagaggttaggtaacctgtcaaatgccataaagctagtaggtcacctgtctcctgaaccaagcttttaccatcaggatgtgttgccagttttagaatatcagccacagagaagagagtggctgtgacaacgaaggagcttacaaaatgtggacactgcagctatgtgtgtcctggaacctaactttctaaaaggagtgccattaagatactactttgtaggtctagattaatcatgaccaagatccttcaactttaaggcttgattacttaaatggatgaaatttcagacaatgtggtctttttctaagagaaagaactgcaaaaattgtagcatgttagaactaagtttctatggccaaaggtgggaaaacaagcaacagtacagataattcaggcatacagaaaaaaaaaaaagtcttgtttgttcccagcccctttgggttttacctgtgagcgtgtaatcagagaaaacacagtttaaagatatggctgctcattttagacagtcctataaagataatggtaatgctgaagaagttattaatatttggttcctaacatatatgatacaaactattaagagttgaccttaatgaaatcttgcaaatcaatatttaaaaatttttaatttgcatccagttgactatatccatatgttagacttccttttgttcattcattcatcacacatgaagtctactttccagtcttacttacctccctccctaggagggaggtaggacatacgtaactagaatataaaggtagaaatgacccagaaaaggtacagatacaattttataaagagaaagaagttacttccagttagggaataaaggaatgcattgtcaagaaggttgcaaagggccaggtgcagtggctcacatttgtaatcccaacactttgggaggccgaggcgggaggatcactagagcccaggaattcgagatcaacctgggcaacacagtgagaccatgtctctacaaaaacttaaaaattaaaaaaattaggtgtggtggtgcacacctgtagtttcagctacttgggaggctgaggtgggaggattacttgagtctaagaagttgaggctacagtgagcgattgatcatgccactgaactccagcctgggtgacagagacactattgccctaggaaagcaactgttttgctgtaatcaatgaaggctcccgatagccagagccacccagaattcacagtcacatcgaaccttgccctcatcctctgcctccttgtcacagagcaacactgccccagtagcacacatctccagtctgtaacaaagaagtcttagcatcaagcatactcaagccacttggatagcaaatgaggtcatctgaaaatacttttaaagtttacttttttaaaaaacagttttttgtttacaggacccaaatggcagttgacattccctgtaaaagtttaacctcttcaattagaattctgttttctttagaatttcaggtgggatctgttacaattcactgaagtttagatttgacaatgttctatctactatgttattgaaaccatataatatttaccaaattcccatacatggtagacagtgacattaattaagaagataatttccaatttgttccatgaagtttcagtgacccactctgtaataaagaacttggaaagggaggttccaagatggccaaatatgaacagctccagtctacagcccccagcgtgagtgatgcagaagacgggtgatttctgcatttccaactgaggtaccgggttcatctcactggggcttgtcagacagtgggtacaacccacggagcatgagccaaagcagggtggggcatcacctcacccaggaagcacaaggggttggggaattccctttcctagccaagggaagccatgactgacggtacctggaaaatcaggacactccccaccctaatactgtgcttttccaatggtcttagcaaacggcacaccaggagattatgtcccaggcctggctcggagggtcccatgcccacggagcctggctcactgctagcacagcagtctgagatcgaactgcaaagcagcagcgaggctgggggaggggtgtccaccattgctgagacttgagtaggtaaacaaagcagccaggaagctcgaaatgggtggagcccaccgcagctcaaggaggcctgcctgcctctgtagactccacctctaggggcagggcacagctgaacaaaagacagcagaaacttctgcagacttaaatgtccctgtctgacagctttgaaaagagtaggggtcctcccagcatggaatatgatatctgagaatggacagtctgcctcttcaagtgggttcctgacccctgagtagcctaactgggaggcacctcccagtaggggccgactgacacctcatacggccaggtgcccctctgagacgaagcttccagaggaacaatcagggagcaacatttgccgttctgcaatatttgctgttctgcagcctctgctggtgatacccaagcaaacagggtctggagtggacctccagcaaactccaacagacctgcagctgagggtcctgactgttagaaggaaaactaacaaagagaaagaacatccacaccaaaaccccatctgtacgtcaccatcatcaaagaccaaaggtagataaaaccaataagatggggagaaaccagagcagagaagctgaaaattctaaaaatcagagcacgtcttctcctccaaaggaatgcagctcctcgccagcaatggaacaaagctggacagagaatgactttcacaagttgagagaagaaggcttcagatgatcagtaataacaaactcctccgagctaaaggaggatgtttgaaccttttagcaaagaagctaaaaaccttgaaaaaacattagacgaatggctaactagaaaaaacagcatagagaagaccttaaatgacctgatggagctgaaaaccatggcacgagaactatgtgacacatgcacaagcttcagtagctgattcaatcaagtggaagaaagggattgaagatcaaatgaatgaaatgaagcaagaagagaagtttagagaaaaaagagtaaaaagaaatgaacaaagcctccaagaaatatgggactatgtgaaaagaccaaatctacatctgattggtgtacctgaaagtgatggggagaatggaaccaagttggaaaacgctctgcaggatattatccaggagaacttccccaatctagtgaggcaggccagcattcaaattcaggaaatacagagaatgccgcaaagatactcctcaagaagagtaactcaaagacacataattgtcagattcaccaaagttgaaatgaaggaaaaaacattaagtgcagcgagagagaaagggcaggttacccacaaagggaagtccatcagactaacagcatctttcggcagaaactctacaagccagaagagagtgggggccaatattcaacattcttaaagaaaagaattttcaacccagaatttcatatccagccaaactaagcttcataagtgaaggagaaataaaatcctttacagacaagcaaatgctgagagattttgtcaccaccaggcctgccttacaagagctcctgaaggaagcactaaacatggaaaggaacaaccagtaccagccactgcaaaaacatgccaaattgtaaagatcattgaggctaggaagaaactgcatcaactaacgagcaaaataaccagctaacatcataatgacaggatcaaattcacacataacaatattaaccttaaatgtaaatgggctaaatgctccagttaaaagacatggactggcaaattggataaagagtcaagacccatcagtgtgctgtattcagcagacccatctcatgtgcagagacgcacataggctcaaaataaagggatggaggaagatctaccaaggaaatggaaagcaaaaaaaagcaggagttgcaatcctagtctctgataaaacagactttaaaccaacaaagatcaaaagagacaaagaaggccattacataatgataaagggatcaattcaacaagaagagctaactatcctaaaaatatatgcacctaatacaggagcaccagattcacaaagcaagtccttagagacctacaaagagacttagactcccacacaataataatgggagactttatcaccccacggtcaatattagacagatcaacaagacagaaaattaacaaagatatccagaaattgaactcagctctgcaccaagcggacctaatagacatctacagaactctccactccaaatcaacagaatatacattcttctcggcaccacatcacacttattccaaaaattgactacatagttggaagtaaagcactcctcagcaaatgtaaaagaacagaaattataacaaactgcctctcagactacagtgctttcaaactagaactcaggattaagaaactcactcagaaccactcaactacatggaaactgagcaacctgctcctgagtgactactgggtacttaacgaagtgaaggcagaaataaagatgttctttgaaaccaatgagaacaaagacacaacataccagaatctctgggacacatttaaagcagtgtgtagagggaaatttatagcactaaatgcccacaagagaaagcaggaaagatctaaaattgacaccctaacatcacaatttagagaagcaagagcaaacacattcaaaagctagcagaagacaagaaataactaagatcagagtagaactgaaggagatagagacagaaaaactccttcaaaaaatcaatgaacccaggagctggttttttaaaaagatcaacaaaattgatagatcactagcaagactaataaagaagaaaagagaaaagaatcaaatagatgcaataaaaggtgataaaggggatatcaccaccaatcccacagaaatacaaactaccatcagagaacactataaacacttctatgcaaataaactagaaaacctaaaagaaatttataaattcctggacacacacaccctcccaggactaaaccaggaagaagttgaatctcttaatagaccaataacaggctctgaaattgaggcaataattaatagcctaccaaccaaaaaaatccatcaggaccagatggattcacagctgaattctaccagaggtataaggaggagctggtaccattctgaaactattctaatcaatagaaaaagagggaatcctccctaactcattttatgaggccagcatcatcctgataccacagcctgacagagacacaacaaaaaaagagaatttcaggccaatatccctgatgaagatcgatggaaaaatcctcagtaaaatactggcaaaccgaatccagcagaacatcaaaaagcttatccaccatgatcaagttggcttcatccctgggatgcaaggctggttcaacatatgcaaatcaataaatataatccatcatataaacagaatcaaagacaaaaaccatgattatctcaatagatgcagaaaaggcctttgacaaaattcaacagcctttgtgctaaaaactctaaataaactaggtattgatgggacatatctcaaaataataagagctattcacgacaaacccacagccaatgtcatactgaatgggcaaaagctggaagcattccctttgaaaactggcacaaaacaaggatgtcctctgtcaccactcctattcaacatagtattggacgttctagccagggcaatcaggcaatagaaagaaataaaggatattcaaataggaagagaggaagtcaaattgtctctgtttgcagatgacatgattgtatatttagaaaaccccatcatctcagcccaaaatctccttaagctgataagcaacttcagcaaagtctcaggatacaaaatcaatgtgcaaaaatcacaagcattcctatacaccaataacagacaaacagagagccaaatcatgagtgaactcccattcacaattgtttcaaagagaataaaatacttaggaatccaacttacaagggatgtggaagacctcttcaaggagaactacaaaccactgctcaaggaaataaaagaggacgcaaacaaatggaagaacattccattctcatgggtaggaagaatcaatatcatgaaaatggccatactacccaaggtaatttatagattcaatgccatccccatcaagctaccaatgactttctccacagaattggaaaaaaactactttaaagttcatatggaaccaaaaaagagcccgcatcgccaagacaatcctaaaccaaaagaacaaagctggaggcatcacgctacctgacttcaaactatattacaaggctacagtaaccaaaacagcatggtactggtaccaaaacagagatatagaccaatggaacagaacagagccctcagaaacaataccacacatctacaaccatctgatctttgacaaacctgacaaaaacaagaaatggggaaaggattctctatttaataaatggtgctgggaaaactggctagccatatgtagaaagctgaaactggatcccttctttacaccttatacaaaaattaattcaagatgaattaaagacttacacgttagacctaaaaccataaaaaccctagaagaaaacctaggcaataccattcaggacataggcatggacaaggacttcatgactaaaacaccaaaagcaatggcaacaaaagccaaaattgacaaatgggatctaattaaactaaagagcttctgcacagcaaaagaaactaccatcagagtgaataggaaacctacggaatgggagaaaatttttacaatctacccatctgacaaagggctaatatccagaatctaaaagaacttaaacaaatttacaagaaaaaatcaaatgaccccatcaaaaagtgggtgaaggatatgaacagacacttctcaaaagaagacatttatgtagccaaaagacacatgaaaaaatgctcatcatcactggccatcagagaaatgcaaatcaaaaccacaatgagataccatctcacaccagttagaatggcgatcattaaagtccggaaacaacaggtgctggaaaggatgtagagaaataggaacacttttacactgttgatgggactgtaaactagttcaaacattgtggaagacagtgtggcgattcctctaggatctagaactagaaataccatttgagccagccatcccattactgggtatatacccagaggattataaatcatgctactataaagacacatgcacacgtatgtttattgcggcactatttacaatagcaaatacttggagccaaccaaatgtccatcagtgagcaaggacatcattctgagcaaactatcgcaaggacagaaaaccaaacaccgcatgttctcactcataggtgggaactgaacaatgagaacacttggacacagggtggggaacatcacacactgggacctgtcatggagtaggggtaggggggagggatagcattaggagatatacctaatgtaaatgacgagttaatgggtgcagcacaccaacatggcacatgtatacatatgtaacaaacctgcaggttgtgcacatgtaccctagaacttaaagtataattaaaaaaaaaaagaacctggagaaattatcaagtaagcatcatatttaatgaatttatggtgaaatcatgtgggaaaaatttttctgtacagggatgatgactctggaaatggtggagagagagacagaaaaacaaatgtcactgtaacacaggtatttaaattgtatttaaatacacagacttttgaatttatagaaaattttcaagtatgaaattgatttcatgcaacctaaagtctcaaacttcaaataattttttgtgttaaatttataaattgtgtattaatgcaattcaaatttattcctaaaaatattttaactaaaggagaaattcctggggcctgagattagagttttaggaaatgtacatatgggataaacttacacaggctgaaattaagtgaaaccttacttctcaatgttgagatggattagccattttaacataaagtagaaacttctaagaaatgcagaatctcaacttccccaccctcattccacctaccccacccactcaatcagatcctgcatttcaataagatttatttagtgcaataacttttttacttatcaaagttgagaagcacaggactaaatgataaagagaaaagaggctgcttaggataaggaaataaaaggttgaagttaacttaagtattatgatactttcttagcgtgtcatacggttacctgtcatctttcctctttggttcaacttgttttatggggacatttatgtgggaaaatatctttgcttttgtaatttatgtgggaaaatatctttgcttttgtgtttttacttaagtaaaatctgggctccttttatgtcaactagcttttccactattgttattatgatagaaagtacaggctacttataaacatgattagttcaatgagaacttttagaatattgctgacctaaatctggacatctacacaatcattaattcttaccaaaatgctacaaggcaatataagcataattagcctccctgatccctgaacatagcctaatatcactcactcaatcagaatcatactggaaacgatatgaccaactatggcaggtagtagatgtccagtcacactagtattgctttcagccagatgtctctggtccttgtgagttcctttcgtccttaatggtgaaatagcaacagagggaaccaactcactcactcaaggcagatttcttatttctagacttgtcctgaaaccaacagatccagctctctcctaccaaataccatgaaatttaaacaaacgaaactcgcaaaataatacagcagcagcagcaacaacaacaatgaaatattaaaatagtaaatataagtatcaaacatcaaaaccccctctccaaccaaaatctctcttcttcgataaagttcccaggaggtaacccaatttctaggttggtgtccaatatttgggatcatttgattcaagactgaagtacttaaaatggcttttaaaaaaggaaaaaaggttagatttccagagaaaagtgtaacattttttaagttgaacattatgagggatttgatgggggcagctttgcaagtagaactggagactggtccactgttcaggctttttacgaaagactgcaaaggttgtttgtttccaaacaccaagaagtcaccaagttcaccagtccaaatgcaaatgactcacactaggaaccctaatagtgctgctgttaagtcatttgcaaatgggtggggctgagatgacacagaaccctattttcccaggtggcatcttaagtatggttgattctaccttcagccccacatttaaaagtacagtgtaaacacagctaagggaccgcctccttcaaattacacacaaggcacacctactaataggagatgttgtgaaagccaggtggggctttgtctttcaagtccctgcatccaagaataagcatgctgtgtacaaaaaaaaaaaaaaaagcaagggtgatgcaactgcattcattgtccctaaagggagaacatgcaataattctcagatccaaggataaagggaatccccctttaagaaaagatgttggcattatgtggggattgggaacatgccagaacaatcacacatttttacaagagagagaaagagaaaaaaagttaagacccatttgtcttatttcagtctctttcttcagaattgacgactttaatcaacaggtcactttcagagtattgctggacaccttgactttctgccatgaaatgctatgggaattctggcagttgagagccaacaccccactagacaccagtgctgcataaccacacttttaatagaccccagagctgtggtgacagcatgcccttcccagtttttccacagacggtgctcctgaaattttccatagacagtgtattcttgtggttaattagttatctgagcaatttccattatagaaagagtatctgtacataattaaacccatcttaggaccaaactgccgggcttcaatgtcattaattcagaagggctaaaatgaaaatgagatgaataattctcacctgatgaagggaccgcactagattagatcctatcctctgaaatacatacagcattaaatttaaaaaaacaagagagatgaaaacaggtgatggaagaaactggaaaggtaagttgcctctagagaccaaagaataacactccttttcaaactattatcaagaaatcttgggggaaagataaaattagcaagagaaggctattagctctctgttactcacctttatgaaaccattttcagggatcagtttgttaaattccactgaaacgtggaggtacacagcacagcccttcttctgggatgcacagtcatgccatacagaagcgtgtgggtagacgccaaaacatgtgtggacctgcaaccctttctgtagaaactcagcattctgagtagtaacaaggattaaccttgtgcactcatggagaaaactggtggctccacacatccagttgtccttcgggttatttttgcatcccactctataatttcttttaattacttaactgtaaagcacaggaaagtgctcattacttgtagcttaatgcaggaggaaatataattgaatatgttctcctagccactgctctaccccagctcccagctcttctgaagtgtcacggttcatttcaacagcacgagtaaggcagtttccaggccctgtgcataatgagccatgtggaccctattcaagaaactggctgtactccagaactactataaaatataaggaaaatattaacatcttagatgacaaaagatccatatggctggccagaaaatatctgcatcatttaagccattagaatgcacctatatggaaacattcaatttggcggtactgtgaacaacaggactgtgaaaacatctgtttatctccacccgttttcactaaacactgattcctatagaagacatgcaaactcaaataccaacatatttcatctaagcataggacagggactccatttttacatagttgctataataaatacaatacagtatttgttggtgataggattttggaagatgctctggatagctggaaaaataagtaaaatgtttctctttgtattaaacttgataaaaaataatagctaacatttattaatggtgaggtaaataatttgattatccaccatttatagctgaggaaactgaggcccagagagtttcggtggattccctaagatcacatacccattatgtggtggagagggaatatgaaccagtgctggcttgctatgcctctttccatatggggtcagacatagatgtggtgtcttataatgtgagggaggtctacttggcagaaatatcctgcagaccctatatgccagtttcttatttatttaaacaaagccccatatgagcatttctgataagcagtttgtttacacactaattccacagaggttaaatataaccctaatgtttctttgttgctactctgtttccagtattgaattattaccacaaggtaccaaccatatatgcatacttaatagggtattttgtcaaaactatgcatgaaggtcatttgtttgagatgtcagaacattttcccgtgagaagatctcattgggcattgaaacagaaccacatgctcttcagaccagcaaccgcgactaccaaatactcctctgtcaactctacttgagtaagaacgctttcaattaaggcctaagtgtcaacatgcctttaaaaaaaatcgtggtgacacaaaatctttctttttagcacccaacagaatcccttcaaagcctcgtggtctgacaccctatgctacgtgacttgtgacccatccatttgtcatgttcttcgggaatgtggctaaggggctaagatgtgacttgaaaagaaaggtagaacaagatcatctcaaatttattatcaaggaatagttcagaaaacgacttcagaccacagagacagcagaacagatggtccggcatggatagagcatcagacactcacagactgtgccaacaagagccatcgagtcaaaacagccaaaggaaggagggtcatggaatgggttctctcacaccaaactgatgcccagaggccctcagcatgaataacaaaggcaaccagacccacaagccatactgagtggatacaaaacctatacctaggctgacatcccaaatgtgtgtggcaagttagatgatgatggcacaaaagacagaacaccttgcttctggccattgtcagctcttggaagagagcacacttttagaggagcagctgcaaggagcctgagaacaaaactggaaatgtctgttatgaaagccttcacaggtattattaacaaaagaaaatgtctatttgtcaatggtgtttcagctagattttggcagtccattcttatgcccaggaatgacctcttgtgtagactggatacagtcatcaatgcaactgtccaggtgcaactcttctataaaggggaagaggagtgactttcccctatacagtggccctgtcaaaattctataaaaaatattgtccatttaaattaaataaccactgtgcccggctccatttaccacacttttctatgcagtggaactgaaggggatttttttttttgctgtcctcagagaaaaataagactaagaatcaacctttctaatgagaatggtaaggagttatgtggggatgacctggaatatatgctgctcaaatggtggagatgttatctaggccgtaaatcatggcatttttatatgatcccctatttgcctaatgcaggaaaccacttggcaactttaaggaaaaagtctagcaataatgcatcatagttcaatgtttatattgtacttggacagtttaaatttatcttataaagtactaattatttaattacaaatgttgagtaagtgtaaaatcattcctcaaaaaagcatcccttgagtatgaaagttccaagcttagcaagacatccctgtgatttgggatacatctcttgaactcagtcctgaaaataatgttaatagctgagaaaagagcattgaaagccttatacacagtgtgttgtagtgaaacaattttctttttggttctaaaaaacactgttgtgctctttagatccagcatggctagttagatgaataatgaatgcatgttcaactttctgctacaggaaattctgcaagtggcaacgtgggtccattccgtgtgtgtcactagagctggcgcaagcccatggccatggtgaggcagcgtttccactggaactaatctgatacctgcaccagctcttgcaactgtgcagtgttcccactgcaaactacggatggggtaaaagactgctcacctcctatttctcatctaatctcacacactctgtttgatgaggctatggagaaacaggtcttctcatacactaaaggtgggagtacaaacaattcaagccctgtgcaggacaattaggcaatacctatcaaaattatacatgatttttcctgctgacccagcaattccacttctgggaataattgacagatataggtgcatatgtacaaaatgatggaaagctctctggtatatattagtaagtgataaaacaaggtgtaaaatagtgtatatatggctactaccttttgttttaaaaatgggggaaaatggtggagcttgcggtgagccgagatcgtgccactgcactccagcctgggcgacagagcgagactccgtctcaaaaaaaaaacagggtggggtgggggggaaataatagtacatactcatatttacctgtatctatataaaacacactatcaaggattcacaagaaactaatacaaatgatcaccttatagatggtatgtattgggggatactgaggtgagcagggtataagtggggcaagacttttcagtgtaaacttcttttaaattttattttgatttttgaataatgtaaattaactgtcaaataattaaattaaaaataaccaatttattaacaaaacatttaatctagtggctttacttttgacacaagacaatctccaaatctccaccaatcaccaaaaacagagatttacaccagttcctttgcttgtttttcctggtaatgactacaattaagaagtcctgtgggtgccatctcagttttggagatatttccctagaagaaactgattcaaggtgggacaattgggtatagagaatagtccctgggaccgggggctgaagtcctgaattctggtcctgcctaactcccactttctattaagctgaccctgtgaaacggctgatacatgaccattttttaccaacaaattagacaaattcatgggtgatcaaattcaaaaaccctgttgccttaccactgtaatatgatgaggacacgtatacacaccctgcctaactcacagcatcacaccagggattgtcaacatatgggaaagagctttgtacattgtaaaggtcaaccctacaaacagcagctgtgaaacacaacacaaccctgagggggtggccatggccaaacataggaggggaaaaggacccagtctcaaaagcatctgagatactgagatagtgcagaggaatgaaatcttccaaaagatggaatctaaacataaacagacatcaagagcgggctgacttgcagtggaagatgtggttaaatgactccacatgtggtcatctgccattgcatacactgcaaattctgtgaagcctactaagggaaattagggagatgtaactgggagcgcactgtaaagatactgatacgaacacgaatgtgagatcaatgttgaatgatggacccaaaaggatggctcttagtccttgtgaacatatagttgttggagacatgtgtctgtcatacacagataggcctccaactcacctctgaaatcagatgcaaacttcaaatacttttgaaaagtctccctagaggaccttttacccccaaatgtagagactaaatgaaaaaccattctttaaaaggggttaaaaaaaacactcaaaaaacttctcctttccacatgtatagtcatctggaaaacagatctcccattaaacggatggtcaaagctgtatcacaacattaaactaagcacaaaaattcaagacttcccttcctcaccctcctaaaacgaaacattccaataggctagaaataacctcatgaggaagttcattgaaggtactcccacttggcactactatccagacactgggttaggaaactagttacttggaactcagaaaaaataagaactattttgattaggcaaggcccctgtgcaaggtgcctagttccagctgggtctcagtagtctgatgggtgtcatgcactcctggacctcctcttaatgaaacaagggaccttgactttgggccccatgttgagaagctctgaagccaaatataatggtcaaatataatgtcctctcacttctagcttcatagcagaccatgtttccatatagaaatttctctaggaggcttactatcctatgttatctcaagccgaggcctcctcttacacaagaggcttaaactgcccgtaagtaagaattaaagatatgttacattttttatgaattagtcatttattcattcagcaaaggttattaagaaggtactgagtttggatgtactttgctttaggaaaatcattttcaaggttgcttcatgcaaagtgggaataattaacttggtaactcaatagacttgctaagtgattgccccaagtttaaactgtcactgatttgcaagtatgacatgaaaaccagagacccaaggaggtgggcacattcccacctgtcaatagccctcaagagaagtgcttcagtattaccccaaatggccaactttgcatggttaatcatttagttagaggctcacaagatcaaaaacaattcttaaaaaactatttatgtgaacaaagggacaatgagctgacaccttcaaggtgcacgtcaggggcacaatacaagttcctgtttcaccagcagagctctggtcgctcagttgaagctgaaagtcagaaccagctgtgtttctgtcattccctcatatgaaaagaactcagctgtagacctttactccatgagaaaacattttttaaaaacccacaaataatttttaggtttcatttttgcctctgctttctccagagctacaaaggtcacccaaatttctgtggcgaggttatttaggagagcctttcttttggatgtcaacttgtcaaacttgcagtttagatgagtgtgatgtagtctcctaaaatttacttttgcactattttttcaaataatagatattctctgagcacaggcactgaggacatcaaaatgaatgagactgaatttctgcccttggggactgcagtgttaagggtgggttagacccaaaaaccaacaatacagtgcaatgtggtacatgctgtaactaacatgcacaaagggcattcccaaaaaagagaatgaaaagagggaggaaggtggcaaaggagaaaggcctttggcccaagtttttgttcaataaagatcatattttgtagatcaaaagattatatgatctgctaaccccttagcatgtatagctcatgaagcaagacaaagtacccatgaagagttcaacattagcgagcctctggggcaagtaagttggaaatcataacccatttatggatacctgcctagaactgatttcctattcagagtgccttcctagctgataagaacaatactgaaatctttcttttccatgagggaaaaacatgttgaatcatttagcaagtacctacagagccacctactatgtatgtgcccagcagtctactgtgtgctatcaggagtaagaaaatgtagaaatattcttgcttttaaagggtttacaatctaattgtagaaataatactaaaatacatgagaggaaagaaaagcaaacttagcttctctgggataaggactatatctcatgcaacttttaaaaagttaccatttattcaacttcctaccaccattacatacttctggtaatcaattatcttccttctccccttgggattttgaattgggaacagaatagaaataagttgccaaataagaatcaaaatacagggtcagcctcaatttcagtgcaagtggtccattgctttggttcacaggctctacagtccagaagatgaaagattaaggatttcatccatcagattaacctctcctcttttcacagaaagaacaagtaatggggataagagaagggcctagaatattcccctgaaagtgttacttattaggaagcaagttcccttgtggaaacacaaggatgggggaaagggatttccctcaacattgttctatctacacacagagaattcaagtaacttgcccaaaatcacagagctagtaagtggtgaggcttaaatcaaacttgatcatcaggtccaggaacacaggtacaggctggggctgcctcatgaagtgtctgtttaggaaatgtgtctttaaagtcaacagactgtcctgagtaggacattctagaacatttttctagacaaaaacatcatatctacaacttccagcctagaatctgatacagcaaagacacacaataatgttttgttatataagtgcatatacaattaattaccaaattatgaggtacagaccacctaggaactcagatagggcaggtttattattatgggcaagagtctttctagaaacaggattccagctaggtcttgaagaatgagtagaattcagatgaataaacagcagaaaaaatcattaataaacacatgagactcagagaattacaacaaaacagttttagtcttgtaaactttgctataaagtgaagcatatttaggtatgaagcatgctgattaaactttttattgtcttaatacaagtctaaaaaaagtatctttttgggggagctggaaagtactaaaaataaaaacagtggctgaaattcattaagcatttactatgccaagcactgctctaagcacttcacagacactaacacatttaatccctaccaataccctgttgagaggttgagatacagagaatttaaattactgacccaaggtcatagacctagtaagtgttaggcctggagtcaaactcgatcctcctctggctcaggaatattgttccaggcctttgctctcacctggaagtttctaattagaaaatttatttcaagtcagaataaaatcttcagcagttctctcatctcaaaatgtctgaatttctgattatttacaaggctgcaaatcccttctagccacgctctaatgcaagtacttggatagtgaaataaacgataagtctctctaaatcacaggatattcagtttatttgattttagttcagcgattcttaaactgtcccatacatccaaaccatctgtagaagtttctaaacccaacataggcccagggacccaataccaaacttacaaatcttggagactaagatctcatatgtatatatattttaaagattcaagggtaattctgatgctgaatgtgtttgagaatcactgctgtatgctgcattctattttattgtatttcttttattattattattataataataataataatacttttaagttctggggtacatgtgcagaacgtgcaggtttgttacctaggtatacagatgccatggtggtttgctgcactcatcaacttgtcatctacattaggtatttctcctaatgctatccctcccctagcctcctacaccctgacaggccccagtgtgtgatgttctcctcccagtgtccatgtgttctcactgttcaactcccacttatgagtgagaacatgtggtgtttggttttctgttcctgtgttaccttgccaagaatgatggtttccagcttcatccatgtccctgcaaaggacatgaactcatccttttttatggctgcatagtattccatggtgtatgtgtgtcacattttctttatccagtctatcattgatgggcattcggattggttccaagtctttgctattgtgaatagtgccacaataaacatacatgtgcatgtgtctttatagtagcatgatttataatcctttgagtatatacccagtaatgggatggctgggtcaaaagatatttctggttctagatccttgaggaatcaccacactgtcttccacaatggttgaactaatttacactcccaccaacagtgtaaaagtgttcctatttctctacatcctctcctgcatctgttgtttcctgactttttaatgatcgccattctaactggcataagatggtatctcactgtggttttgatttgcatttctctaatgaccagtgatgatgagcttttcttcgtatgtttgttggcagcataaatttcttcttttgagaagcatctgttcatacccttcgcccactttttgatggggttgttttttttcttgtaaacttgtttaggttccttgtagattctggatattagccttttgtcagatggatacgttgcaaaaaatttcacccattctgtcggttgcctgttcactctgatgttagtttcttttgctgtgcagaagctctttagtttaattagatcccatttgtcaattttggcttttgttgccattgcttttggtattttagtcatgaagtctttgccatgcctatgtcctgaatggtattgcctaggttttcttctagggtttttatggttttatgttttatgtttaagtctttaatccatcttgagttaatttttgtataacgtgtaaggaaggggtccagtttcagttttctgcaaatggctagccagttttcccgacaccatttattaaatagggaatcctttctgcattgcttgtttttgtcatgtttgtcaaagatcagatggttgtagatgtgtggcgttatttctgaggcctctgttctgttccattggtctatctatctgtttatgtaccagtaccatgatgttttggttactgtagccttgtagtatagtttgaagtcaggtagcatgatgcctccagcttgttcattttgcttaggattgtcttggctatacgggctgttttttggttccatatgaaatttaaagtagttttttctaattctatgaagaaagtcaatggtagcttgatggggatagcattggatctataaattactttgggcagtatggccattttcacgatattgattcttcctatccatgagaatggaatgttcttccatttgtttgtgtcctctcttatttcattgagcagtggtttgtagttctctttaaagaggtccttcacatcccttgtaagttgtattcctaggcattttattctctttgtagcaattgtgaatgggagttcactcatgacttggctgtttgtcattattggtgtataggaatgctcgtgatttttgcacattgattttgtatcctgagactttgctgaagttgcttatcagcttaaggagattttgggctgagatgatggggttttctaaatatacaatcatgtcatctgcaaacagagacaatttgacttcctctcttcctatttgaatatgctttatttctttctattgcctgattgccctggctagaacgtccaatactatgttgaataggagtggtgacagagggcatccttgttttgtgccggttttcaaatgaatgcttccagcttttgcccattcagtatgatattggctgtgggtttctcataaatagctcttattattttgagatatgttccatcaatacctagtttattgagagtttttagcatgaagggctgttgaattttatgaaaggccttttctgcatctattgaaataatcatgtggtttttgtcattggttctctttatgtgatggattatctttattgatttgcatatgttgaaccagccttgcatcccagggatgaagccaaattatcatggtagataagctttttgatgtgctgctggattcagtttaccagttttttattgaagatttttgcatcaatgttcatcagggatattggcctacaattttatttttttgctgtgtctctgccaggtttttgtatcaggatgatgccggactcataaaatgagttagggaggattccctccttttctattgattggaatagtttcagaaggaatggtaccagctcttctttgtacttctggtagaattcagctgtgaatccgtctggtcctgggctttttttggttggtaggctgttaattactgcctcgatttcagaacttattattggtctattcaggaatttgacttcttcctttagtcttaggagggtgtatgtgtccaggaatttattcatttcttctagattttctagtttatttgcatagaggtgtttatagtgttctctgatggtagattgtatttttgtgggatcagtggtgatatcctctttatcatcttttattgcgtctatttgattcttctctcttttcttctttatcaatctggctagcattctatctattttgttaatcttttcaaaaaaccagcttctggattcactgatttttttgaagggttttttgtgtctctaatctccttcagttctgctctgatcttagttatttcttgtcttctgctagcttttgaatgtgtttgctcttgcttctctagttcctttaattgtgatgttagagtgttgattttagctctttcctgctttctcctgtgggcatttattgctatgaatttcccctaaacactgttttagctgtgtcccagagattctggtatgttgtatctttattctcattggtctcaaataatgtatttatttctgccttctttttgttatttactcagtagtcattcaggagcaggttgttcagtttccactgtagttgtatggttttgagttagtttcttaatcctgagttctaatttaattgcactttggtctgagagactgtttgttatgatttccattcttttgcatttgctgaggagtgttttacttccaattatgtggtcaattttagaataagtgtgatgtggtgctgagaagaatgtatattctgttgatatggggtggagagttctgtagatgtctattagttccactgggtccagagctgagttcaaatcctgaatatgcttgttaattttctgtctcgttgacctaatattgacattggggtgttaaagtctcacactattattgtgtgggagtcttggtctctttgtgggtctctaagaacttgctttatgaatctgggtgctcctgtattgggtgcatatatgtttaggatagttagctcttcttgttgaattgatccctttatcattatgtaatggccttctttgtctcttttgatctttgttggtttaaagtctgttttatcagagactaggattgcaacccctgctttttttttgctttccatttgcttggtagatcttcctccatccctttattttcagcctatgtgtgtctttgcatgtgagatgggtctccagaacacagcacactgatgggtcttgactctttatccaatttgccagtctgtggtcttttaattggggcatttagcccatttatatttaaggttaatattgttatgtgtgaatttgatcctgtcattatgatgttagctggttattttgcccattagttgatgcagtttcttcatagtttcaatggtctttacaatttggtatgtttctgcagtggctggtaccggtttttcctttccttatttagtacttccttcaggagctcttgtaaggcatgcctggtggtgacaaaatctctcagcatttgctcgtctgtaaaggattttatttctacttcacttctgaagcttagttggctggatatgaaattctgggttgaaaattcttttctttaagaatgttgaatattggcccccactctcttctggcttgtaggcttgtagggtttctgctgagagatccactgttagtctgatgggcttccctttttgggtaacccgacctttctctctcgctgcccttaactttttttcctgcatttcaaccttggtgaatctgacaattacatgtcttgggtttgctcttcttgaggggtatctttgtggtgttctctgtatttcctgaatttgaatgttggcttgtcttgctagtttggggaagttctcctggataatatcctaaggagtgttttccaacttggttccattgtccccgccactttcaggtacaccaatgaaatgtaggtttggtcttttcacatagtcccacatttcttggaggctttgttccttccttttcattctttttttctctaatcttgtcttcatgctttatttcattaaattgatcttcaatctctgatatcctttcctctgctttatcgattcagttattgaagcttgtgtatgcttcacagagttctcgtgctgtgtttttcagctccattaggtcatttatgttcttctctaaactagttattctagttagcaattcctccaaccttttttcaaggttcttagcttctttgcattgggttagagcatgctcctttagcttggaggagtctgtttttacccactttctgaagcatacttctgtcaattcatcaaactcattctccatccagttttgttcccttgctggcaaagagttgtgctcccttggaggagaagaggcattctggtttttggaattttcagcctttttgtgctggattttcctcatccttgtggatttatctatgtttgatctttgatgttggcgacctttgtacggggttttcgtgtggacatcctttttgttgatgttgatgctattcctgtttgttagttttccttctaacagtcaggcccctctgctgcaggtctgctggaatttggtggaggtccactccagaccctgtttgcctgggtatcaccagcagaagctgcagaacagcaaagactgctgcctgttccttcctctggaaggtttgtcccagaggggcacccaccagatgccagccagagctctcctgtatgaagtgtctgtcgacccctgctgggaggtgtctcccactcaggaatcacgagggtcagggacctgcttaagaaggcagtctgtcccttagcagagctcaagtgctgtgctgggagatccactgctctcttcacagccaacaggcaaagaacatttaagtctgctgaagctgggcccacagccaccccctctcccaggtgctctgtcccatgagatgggagttttatctataagcccctgactggggctgctgcctttctttcccagatgccctgcccagagagggagaatctagagaggcaatctggctacaggggctttgctgagctgtggtaggctccacccagttcaaacttcccagtggctttgtttacattgtgagaggaaaacagcctactcaagcctcagtaatggcggatgcccctcccccgaccaagctggagcatcccaggttgacttcaggcagctgtgctggcagtgagaatttcaaaccagcagatcttaccttgccgtgctccatgggggtgggatctgctgagctagatcacttggctgcctggccttcagcccctttccgggggagtgaatggttctgtctcactggaatttcaggtgccactggggtatgagaaaaaactcctgcagctaactgggtgtctgcccaaatggccacccagttttgtacttgaaacccagggccctggtggtgtaggcacccaagggaatctcctggtctgccggctgcaaagactgtaggaaatgtgtagtatctgggccagatagcactgtccctcatggcacagtccctcagggcttcccttggctaggggagggagttcccctgaccccttgcgcttcctgagtgaggcaatgctccaccctgctttggctcaccctccatgggctgcacccactgtctaaccagtcccaatgagatgagcccggtacctcagttggaaatgcagaaatcacccaccttctgcattgatctctctgggagctgcagactgcagctgttcctatttgccatctggccagccacctaatatttctaatcattcacttagcaagagtctcaggtttaagtaaaattataactaagttactaaggaacaatacatcaaaagtcatatattcatttttccctctaagagttttttcttttttaaaaaaattaaattaaaaaactccttggaaaaaacatttttaatcttcccattaccactttattccttggcacacagaagggtaccagtctctgctggagacaaaggtggacagtaggccagggtgacaatatcagcctgttcctgctccaggtctcacattaatgcatcaagggcaagatatggtttcttacttgaatactgcaggttttggttatagacagctggagtggtggtaaggggactaggttaggtgaagtcactgggctatcatccttgctctggttctacagctgtgcattttggattgctatttagcttctctaagctccagtttcctcctctgttatatagaaataatgtctgccaatcttttttatagagttatttgtaggatcaaatggaatgagatatgtgaatgcattttaaaaatgtatggaataccacacatttggacaagattattattgaagtgtgcaatcttgtctacatgacaagtgaaatcacgtaggaatcgtagtaacaacaaaccagctgaattttggtctcagtaccaatgcctactggggcactgcagtagagcaagttttcctaacacctcatggaacagtgacagtgaaggttctcctaggtttttatgtgagactgcctgaagagcaattacaggctctggaacaatagatgctactaagtttattttattttattattattttttattttactttaagttccgggatacatgtgcagaatgtgcaggtttgttacataggtaaatatgtgtcatggtggtttgctgcacctatcaacccatcacctaggtattaaggctcgcatgcattagctatttgtctgtttgtcctgacgcactctctcccttcccctgccccctgctccaggccccagtgtgtgtggttcccctccctgagtccatgtgttctctctgttcagctcccacttatgagtgagaacatgcagtgttaggttttctgttcctggctaccaagtttaagaaagtcattgtcagggatgtgaaaatcagaaaaataatctggtattttaggaaaagcacttaaaataaattgtattaatgacaccacattttaatgattaataaaatacttgataaggcaatcctgtattaatattcaaccatttatacatgattatttctaaacattatacaatgcaaaaaaattcacatgtttaaagaagtatctactttatcaggtaccatttgtgaatactctcaacaagcaggtgaatacaactctcaatgcaagtgaatatacacagaaatgggcagcaggatggtcatttgcctgtctgtcttgcttgggagtaaaagagaaggctaggaacatggctgtaggtttggtactagaagaaaagtgggacctattccgacttcctgatcctgtgatttttttctttttttgagattcacacacacacacacacacaaactatgcacaagtttgcttccatgttgtatagcaagagtttaaatatttctgagttaatgatgccaaactgtgctccgattatatcagcatatttacatgatccttgaacaccacatatagattcctatactacacatttaagcaaaatcacctcctgacttcacaatgaaagagacctattggattaaaaagtggtttctagtaaaccccaaagagatactgttactaaattactaaatttaaaggcaaaatagtattcactaaactgatttttctgtcttattttccttatttggcataatcattaaccaacttctagtaaatggaagcattctcacaatttaagtttttttagggggaaacacacaatttataaatactgtcaagtgaagaacagattcctgaatactaaaagacccatgcatatccttgtatgtaaaaaaaaaaaaaatccatcataaaatcatagactcaaacaccatctttgattcagtagttctccctctactgtggcttctgctatagagtcattgttaaaaagagttcttcatgaaagattctcacatagcaaaatgctttaagaaaatgtctaacaaacatttttattgtctcaatttgtacacaaactgacacctgaaaatcagagaggataaagaacttcaatctttaaaaaagagaggtaagttattccaaaatgctaccagtcaataattaaaaatacagtttgggggcaagaagttctgaaataactcagagaacttgctcaagattttacttttggaccagtcctctttgggagggagtatgtgaataggtaatgaaagccttatatgagagagtcaatggagagccatatcaaggagcacctgaagatatatggatcaatacagggaaaagaaatccaagtagcccagtgcctgacactcactgggcactcaattaatgcacggtgaattaacaaatgaattaatgaaagaaccatttgctacatataacattcttactttaagaaaaaagaatttgaaacagaagaaaacatacacgcaagaacacatacaaactataaactatatgatatcctaaaggagatgtaaatattaaactgtttgctttgctgactgacactattaatacctaaaagcagtatgagagatcacaaagaataagtactcattcatacttggagtgggctgctcatcttatggtctaacttgcattttatgtcatggccatgttgcttaatctccagctgttctacagaagagcaaaataagttataaataaattattaaagaaaaaaagtaactctatccatgctgaggcctgagggagttgggggaggagtcaattccttttagtttatatttaaaaagagaaactctttggaaaactgtaatatctgaagattttgtggtttccaaaagtgaaggtgaacggtgagaagttttcttagtttagctactgaaccctaaaaaaatataacctcaaaagttaatttcttaagcaatttgggcacctgaatttgataagaacttttttttccagacattctgttctgtctaacccaaaggaaaaatagccaattttgagaatctgtatacaaataaggaaaagtaaaatacagcgctttgcaaagaaatgggagggatttctgatactcaattcatgatgctaaacacttcaagtagatgattcaaaggcagaaatatataactgttctcattaggattgtttatggactataaataaggagcagacttatggccaatgcattagaaaaaaacaagtacaaaggcacttcagaaaataccttactccaacctcccattttagtgtcatttctaaaagggtttcatttcagccttcctacctttcttccttccttcccttccttccctccaacggggtctcactctgtcacccaggctgaagagcagtgggacaatcacggctcactgcagccccaacctcctgggctcaaacgatcctactgcctcagcctcccaagtagctgggactacaagtgcctgtcaccaggcttggataattttttttgtcttttgtaaagatggggtcttgctatgttgtccagactcgtaatgatctcctgggctcaagtgatcctcccacctcagcctcccagagtgctgggattacaggcatgagccaccacaccagacctcttttttctttattatatattcctctaataaagtgctctgtatgcagtgagcattcaatatttgctaaattaaattaatggaaagttttctaactaccatgtagagtatctaaatttacatcattggttctagaactgctgtctgaagcaacacaaattacacttatgacagttcgtcaaatctttgaagcccatcctcaaaataaggatgtcaaaaatacatcacacatgttgacactctaatctcccagccacagtaggcattagcaatctgaatgttatttttactaatccttcacagttttagaattcttctcaacccaacattcaaaaaccacttgccattccagcctaagttttcttgtccctaagtcatgcattccaagtcccctcaaccattgctcacatgcaatgctttcaaattccctatgcatcctggtcacagtgatttgaatgtacactaatttatcgatgatgtacctaaaacaacttatttcatttccttgaactgatgataatattctagatacagtctatttaaaaagtgaagaattattagcttctccatttcagtattatatttctagcagtgcagcccaaaatttcagtagctatgataacagcctcttgtcacaccactggcttatactgaacttgcagttaatttaaaacattcaagcttcctttctacaatctgctgataagtcatcccctaaaaccgtgcccgcaactctctattctctcctaaattgatttttttgtacttaatcatagtattttacatttaagtaaatgtaaatgatccagattctatcattcaacagaatgtctgcaatatctgctggctttatgtttcatatgataagcatatcgtctgtgccttcagacacattatcagccaacatgtcggtgctggatgtattttcccaatgttgcataagaggaataccttcgagagtttggcctaggaatgtggcctgggactccgccaagcatctctctccagcaaaatgactgcaaatttctcgaccttcagattctacatgatgtaaaagaagtttgtctgtgtttaaaaacacattcaagaaataagtgaacatgtgaaaagacagaaaaacttgttttaatttgggcatagtttcagttttcaaaggcacatgaaggcagaaagaaagaatcacaaaatggaactactgatgatagcaactccaaaaccaagactgattagactaaatcccatgtggcaaaaattttatttagtaagtttccttctccctctctccctttagatatatgtgcatacacacacacgcacctttattttagtaattttttttttctgaaaaagaaagttttctgcacctgattgcttccatgaataacacaaagcacaaacaatatgactttctttggttatcatgcaattttttctctgcttaccagaaattggcacaaatttaagatatactatattctactccctgaagcacagtcgctggcatctccactggcatttaaaaatttgaagacatttaaaagaaaatccacaagcttatagttgctgtctaaatcaactttaacatttcatatattcacaatttcataagtgaatcaaattacacataagaaattatagaactaagccaactaaatgacttttataataggtactggggaaaaatattattaaaccttttcctccaatttctgcctttcttccagcaagacaaaccattttcatgaagtttctgtctacatcactagtgataatctgaagcagccattaatcaatctattagtgcattcagcaacatttatcaaagtgcctccccagaactgttttggatgctgttgtgggcgcatgcaaaaatgaactaaatatagatttttgtcatccaagaattttaagtcaatttgtaattattggttcctggttccataactttttttttttttttttttggtgctggctcagatgtataccttcatctattctaaggttaaggcaatccttataattttcttcctttttcttgtttgtttgttttttgtgtgtgtgtttaaaatcttgcttatatttgactttattttattctcacatcttctgagtacattaaagttaaaggtagatcataaatcgaaaacattcttaaaggtctctctactcaaattatttggtgttattgtatctcagaaagtataatgaattgcctgtagcaaataaataaaatcagaacctttatactcaatggttcggtttggtacatatccatgaaaataataaatgttaaaaaggatgctagccgttgattcctggcatgctattctacatttggctacattacaacgttaaaaggatttagtgcatatatcaaattgtggatctgcttgttttaaaatttcatctgtaattccacatgcaacccccacccccatacacactcacaagatctgaatatggtaacaaggaaatcctagtaactgtagcgttggaaaaatggttcatatggaaataagccatttggctagtaaagctggtgattttgttctctaggtggcactattacttcaatttttggtgagttgcttaaattacttggaactgcccgtttattttctttgaattcccattttataaattttaattttatacaagctagttgtaattaaacgacaggttgccttctaggttttatttcagtaagtcaatttgaagttcagtgattttttatcatataattttatgtttccttactatactgtcttagttttaagaaatcctcccttgcctgacctcctctctccaaaaatgcagaggcatgtcaaaaacacagagggtcgtcataaagtttccgtcagaccaaaggaaccaagatgaaagcatgtttaagagctactaggttctgggagatttcaaaatcaggacattactaccatgacaaccaatgaaaagttctttcaagtgaacctttggggaaaactatataacgttccttactctctaggctctctggaaataaacttttactttattatggctgtcactaaagcttgtaaatttactttgcttccttccaatcgttctcctgtcccacactcagccccctaactcacttaatgcaacccatcctcaaacatcaatctataaatgagacatcagggcaatgagccacttcttagcatctagtatatttgataagatttgtctcatcaagaggataagtgccctagagcttctacttgaacttaaatacttaatttaaatgaaagcttccacacttatctgaccagatactcaaatttttctacagaaaagagaataccttcctgttccacttaaagaacacacacatttaccactccccctcctctcccctgcaaaaggttttcaatgtcagtacattagtgagctccattttgcatctgccatcaataatgattccatatagtcaataattgggttcatgacctttctaaatctttacagtgtaaatattctggaaatccagtgaggcacttaagtataaaattatttaggattaaataattctatgccttaagtagaagtttaagaggacgtttaggacacacatgactaagcctacaaataccaaagccactctatgtttcctaggtttaaataccacatgcaaataacatacggatttcatttgccagcatcatttattgcctaacattactccatactaaacagagtaaatggatgcagagtgtaaccagtaagtttgctcattcacttttgaagctcatctgtgcatgttattcatcctaataaagaaaatttatcacaacacaacttgatgcgattcttgttcaaatgatttcctcttccattgaacaacagccagcacttaaaacctagaattccacagaattctctcctcgattcctctttaaaatgcaattcacagtttgagatcacagagcctgccagtggctgaatggctgcactagatggctgagagtccttcaattaagcaacaattttgcaattagtggaaactgagtgctctataacaattgtttgaaaacaagttgagacaagttagcaattaccctataaaagggacatattcacttttgttggataggcgagacccctcacacaaattgaactcttccacacagggagatgcaagttgaaaattaatgttttaatcactaaaatcaaatccatattatgggcacctgaaatgggagtgcctttcttctcaaaagatattcagagtttagctatcatccactctctatgctgtctgtttttattcaggaagtctgaaattgttcttctgtactccgggattaatttcctacatctcaaaatgttaataaactacttgaacatgacctttccattctgtaaatttccttaagagtaagtctacgattgagacccaaagctgctggctgtgttatatttcacagttcacagttctctctctctctctctccccctctacacacacgcgcacgtgcacgcacacacacacacacacacacagagagagagagagagagagagagagagagagcaccccaggttttagaagatgaatgtaaaaagaatgtaaacaagttctctgctatactatcaggtgggcgtgcccagctcactgtgcgtgctgaactacaaaccagtgctattcatataagaaatgatatcaatcatctacattttgactattgaaaagctgggactcttaaagattccaggaaaaagggaatagcttacattttcatggcgccccttttaaacaggaaacccacggactttgagccaggattttagaaatttgcatttctttttttacaggattttccctcctggtgagtcaaaatgaacaagaaataccccaggacctcccttccctccttggccattaatgagatgaaggcaattaactcacatagtataaatgaatcatttgaggtgatgactgcattttaggcaaatgatgactttcttggttccattggtttgcaagtaaaagttacacacattgaaaagacactgaaacagatttcctaaatgcttcattttctggatgcaccaatgttgacctactatacatgttaaatggttttaaaatatcaccttaaaataaaggaaacttccagctactaactcagctctgaatgggctatgaaaggctccaaaggtatgtgaaaaattactgttattttgctttaaaaaatgtgatgtctaagagtgtctgcaatgttctaatgcttcaaaacatgtacgtaagccttgtttatctggaaatcatttctttctgcttatatcatttataaatagaaaatgttctgtaataacttaaaatagttccacatacataatgcttttagtgtcataatacttactactggtctatatttaccaacatttatcacattttacaaaatgaagtagaagaaaaaaaagacaacgactttatggccctggaattccagtaatggtgaccaacatgttttaaattccagtaaaggttatggttacatttcaacaagtgtctctttccttttttttacctctcctgctaacccagaggtaaatttcccaaaaaaaaaaaaaaaaaaaaaaaaaaaaaagtcttaagcaaggcatttgcaaaatcagaaaacaggaacaggagtttagtgattgtttttaaaaggtgctgttcccagggtcaaaactttgtggtgtaatttcaacatgctatgttacctattatgtgtaatgccttgaaacgctacatgccataacatcagaaatctccaacctaaaaattatgttgcatgagataagcattgaaggcacacacgttcatacaaattaaatctgtaattatgcctcaataagttaaaatgtaaagacatatcaaattgtaagaccaaaatggcttttgaccttacaacaaactcatataaaaatagatttttccataataataaaggggagagagagattttgcaggatattgagtcagtagggaggggtctcatttaatatcatgtcgccttttatatgcagttagaaaatcaacgttcccaattacatattactttgctttaaaagattactaggaggattaataaacactcagaaatatgcctttctttgcttctggccaagaacattcctgcgtgcttgtcggaaaatgttctttggttgctactgacattaaggagtaagtgcaggataactagaggaccctaaaataagatccaagaagccctaacacaccgccaatcgaggcttatcaaagctcccccagcgcgaggaaaacttgcatagaagccaaacaagaacgaggagtcaaaatccaccgacgacgagtcgcacgccccaccgagctggagtcagcagcaccattcaacaagtccctcctaccagctctctaagggatcccgcaaaaccttcctttaccacttccccacccccagcctcccgcccccagtagctgctcttggcagcatggccggcagagggcaccctctaccttccctagcttcgttctctgggtcccctcctcctcctcgcctcccctccaccccggtccctcatccccgctctacccccaacacacaaacactgcatcctccagttcaccctcgcagccccgaggcttcttccttagggatgcccctagtctgtaatctccccttcttcttgcccgtcaggcacagagcccccaatcctcagctatttctttccaggagtaactcactcacccattcctcttcccggctctgcatccccagagactaacccgagtcaagaatcccccacgtacatcccaaccactccccgaaagtcaaaactcttaacttccctggagggcgcttcagaagaggggcgcaggatgggtagagatgtgggttcggcctgcccgagagtgtcgcagaccctttcagttcccagcggtaggaattccgcctcccaagttttccaagctacattggcttcggacttgtaagtccacttcagtctcaattcctggggagcaggtagccgtgtgcagctccggggaagggatgcgggctgaaggcgcaagcttccctcccactccccccgcaagtcggcgcggggaccacccaccccctggaaggattcctagcctagccccagcaccctcccctcagtcaggaccctcgacagctctggccccctaagtctctctcgactactcctgggctgggggagggctgcgagggatccccgggtcgccgtctttgctcccatcacgcagctctgggtctcctccaggccttccctcctctacttcgtgacttccccgggtccctttttccctggtggtgccggctgaccttctgggttgtgggatgggggagaaaactccccaagagtaactccaaatcgtcccttctaccggaggggaggaaagaaggagactggcctcgtcccacaactttggggtgggggatcccccagtcaactctctcccgcggacgggcagctcctgcaccaagccccattcccagcgcttgcctacctcggggtccacacaaacctcacgggtccccggcggcggagtcacatcgtggttccgattctggctccagcgcccagccccggtccccgtcgcggtgctgctccccgccggccccacagcagcggtgggtgtctcattaaagccccccgagcaggaggtggaggggcgcaccgggctggctcctctgtccggcccgggagcccgaggcgctacggggtgcgcgggacagcgagcgggcgggtgcgcccgggcgcggcggcggcagcgtcggggacccggagctccaggctgcgccttgcgcccgggtcagacattatttagctcttcggttgagcttcgattggtcaaacggcgccgcccccccccccccgccccccgccccccgctccccgctcgcccgcgctaccgatacccgttcgaggcggccgcttaaagggaacgccgcgtcttttcctcgcgcggggaaccgaggggcgcccggaactccccgctcccccggggcctgtcctcacctcctcccctagggccccgcgacatcgccctgcgagtcctgcgccctcctggggcgccttggacaggacgcccgcggcttcgaggggtgttccagccccagcctcagccccggggaaccccgcgtcccgcgccctctgcagaaaccccggctgtgggcgctggggcgggagggagcgagtgagaatcgcacgccccgaggtctcgctcccctagctttcaactctccccttcctccccatcccagcacccaagttctctgggagagggcgtgcgtttcccgggccacagacacaccttcccgcaccttcctgcactacggagcttgcgaacgcgagcacacaatgaaatcgcacagagcatgggggctattggtttactctgctgccttaaacacgccggcttaaacagagttcgcgcactgacctctctagagtttgcctaataggaattcaatcaagataataacagcattttttattgatgaacgcccccagataacgttacaccaagttacttgttccagccaggaagcccaggcaatgacagacctcgctaaagccacacgctttctagccgaccaaacagaaaaacggaaagagaaagaaagaaaacaaacccaccttttcagtcactacttgtcaaagtaaccatcaaggcagctgctccgggaaagacttcggccccaaaactcccacactctattattttttcacgttcccttcgcttaattaaaggggggagggggcgcgagtctttggtgcccggtatgtactccttctgttctgcagcaaagaagttaaattattgatagtggaaattgcatggcggaggtaatactcgcaccccatcagcgagaagctccatttgatctcggcagaggcagggagatttcatgctagttcgccggggggagcggcagcgagagcagccctctccgcggtgaatgggaaagtgggtgggagtccacgagagggctccacggtgccttgacgtgcgctgtcatatgatacctccgctgcctcgaaatagacactctagtgcacgaattaccagaatcaaaattcagcgcatttaaaatgatacatcttttattagaagagttccgttccagggcattgcatgcttttgcagatgttttcacttccagccccagcaaacacacgtataagctaacccttttaataacgaaccagggcagccaagataaataaaaagtcttctgctttaaccagagtgggggtaggtgattcgagggtgggggcagaactggctcagttaatcctcccccgccctccacccccaccactgcccgcagcaaaagagcaaatagcctttcgggttctcatttgcctgtagccaagacccttgaagagaacttatatggctagggtccagaggacattttcaattatccatttgatgaactctgtcaaccgtctacctgtgtttctgctttaaagctgaattttcttctcattagttcaaccaatttgtgcagaccttaaaatttagaataaagaataagacagcagtaccgtacttaacttggagtccctggacctcctcggagcataaaaatcacctgggtgagtgttaaaatgaaggtccctcctcctgaaattgtgatttagtaggggtggggcagggcccaggagttataattttaataaataccacaagcaattcgaatgcagacaatctgaagtcacactttgagaaacactctcttgggggtacaacactgggtatcagaggaatctcccaccaagcccacacccaaattctgcaggcagctttctgtgtgtgtgcgtttttctgtaatctcaaaggggtttgacctaataattgcgaagactattgctgtaagaatttccctaaagactccaacattaattttgctaaagggaaagatttataaacagtttcctttcctggaccctcttgtggttaccaagaatgtgctgttgaactgaatatataatattattacatactcagttcaatttacctaagggtttacagttagcaaaatgaattcactaacattagctattttagaacttctaaagactagtgacagaaattatttacccgttttataaaagaagaatccgatcctctgccaggaaataatttacccacgttcacacagtgaagtaccagggacaagacttcagtgaactcaagaattcctgctagaaataaccctgcttccatctcccccaccccctaagtgaagctatctgttccttggaagtgttatcagaatgtgtgatcattcagagcgcctttgcaaattgttggactaaatagtcaaattattcaaatatatgcatattcttcgagtgtcacacatttagctttgcacctctgtcaacttgacagagcacatgaccaatacaaactaccctacagcacagatggcagagtttattgtggaatatttaatgtatgtgaaatacgcaggctaaccagaaagcaataaaggacagagggcatgaagctggataccgctaccccacagaccctctgcgttggttcccaggttgtaagatgaatgcaggcacaatttcttttagtagcacaatacaatttaaaaggctagtgttatacatttaaaaaaaatacttgtactacattataaaggactggaggaaccctactccaaactttaactttgttaacttcaaactgatgcttcacatttgcttgaaaatgagttctaccctcaggtttttaagctcaattgtaatttatttccttcctgaaaaaatacctggcaagttaatgccaggaatctaagctagcattctgaaggctgctcacttagaagttatggcaaatcttttttctgctaaattcacattggcacgtcagcatttctgctgaaggaaaaagtgttctcatttcccagactctgattgggtgggtctatggccaatcttcttattcctactctcccttgacattatataaataaatgtgtgtatcttcgctttccagtgtgtggtgcagttttactgaggaaaagacagaggagtcagaaatgtcagggatatttagaaagaaaagaagatcagatgccaattcagataaccatgatgaatcacacctcttaacacttgtaagcatttccaaactttctgatttgtgattatagcattgccaatactgtatgcgaccagcttaaaacatgtacttatttgccttaaaagtacatcttacattcaaaaacaatgaagccaagataaacaaaattgtaccagtgccttgcatggaattctaaatattattttttatttgcttaattcaggtagcatatagagataattttggaggtctaaaatcaaacattttacaaaattatttccctattgtgggcaaggatgatgctgagaatatagagcatgcatttctcttcttcttaaaaattggcctctggcataattgatatgttaggagcaaagtttccaagtttataatctgaacattttctctattactaaaatgagggaaagtttcacagcttgaaaaaataatgctacctatttcacttttgtggggcttaaaaattaattgtgaattcgtctgaatctttatttctttttggttatgttctaatatgatcctaacccaatgttccagggggaacaaaggtcaggaagaaatttgaattcccatctattcttgtcgggaaatataaactaatcctcattactcaagtgagaacagaggtagtaggcttgacattgacatgttttttctattaataattttaattggctgaggtcaattctatcactataagcattttatatttatgtttatttaagcttcctagttactcctaccttcagtattccttgcaagaaaaaaaaaataagttgtctagtctagcatcaaataagttggcctaaaaaaactgttgaaactttccgtaattagcatagggaaaatacttagtaaacagaaaactctgctgttgagcagagtggcacaggtgttttcaaactcatcctggataatttgaaaggcctggtccaatgttaaactatgtcactcgcaatccttgaaattcttgtatgaggcctgtcctgagaaaaaccttaagggagaagtaatttccctattcatgagatgttacgttctcactaagctttttatgaaccataagaatagctcaataccataccaaaatgtgttcaaattggtcaacacctgttacaggagttatgtaaccaggcatagccattagtggcagacaaaagaaaggaaccacagcaagaaacttttagaagggccaagactaggagagtagaacaagagggtcaaaagctgatcccatctgggaataatatttagttggatcaagaaaaacggcatagaaaccattaagaaactgttgagactaaacccccaaacatatgagaaatatcaacttgtagccctccaagttaccagatttgtgctgagaacatttaaaaattaataatgaagaataaatttggtttacttgttgtaatagttctataagcgtggtcaaaagggatgtgagattgtgggcataagttagagctgacagtaataaatagctgtggtattagttggttttgctaggagaaaagccatgagaagaattaacaaatttaaaccaaagggtttcaggacattgaatcagatgaaagatgaacattagcttatttttgagactcacctatttaggctgtgtgatgtttggagtgagagattttctacagccaaattttaaattcttcatgaaaaaaatgaaaaagaagaatatgcaaaaataatttagaaaaaaataagtgaacttcctaaagtcttattttaaaaacacacactaagaatttggcctactttcatgtgattctgatacatgaatctacaaagcactctttagtggtctttttgaccaaggacttgagcaggatgtgcaactggccctctttctacctccagatagcacaggcatggtgagaatgaaatccttaatagtgcatggttgtgaagaatgggttaggctttagattagtctggcatacagaatcatttggaaacatccgaaactcctgactttctcaactttagttgcctttcacttcatagttacagtcattcagttgatgaaagattgctgagtatctactatctgtcaggaggctattctatgggctgatacaggcagatgcataaaatacattttagccctttacatgctcatattctaggacataagagttgtattttaatccatggtgacacttgcaaatttgttaagtctaggaagttttgttttgttttattttcccttgccgtaggtttggtgtgtagaaagatgatggtaaacatgcccctagtggccagggggtggtagtgatggacaagaaacttgctcccaaagctggagtggcacttagaggcgggggagggcccaccacggttaatcagtccccagttatttcggttagcagtgttttacaaaaggtagacaaaagagaaggagtggatagggtgagagggaggaaatcagataatttttgtttgaggcaaataatttttctaaatatgatagatagacctataaaagataggtccagaagggatcttaagagattatctcatctttctcactatttataggcctgtcattgcagaccagggaagtagactacacatccttcttttggggagctatctagaatccagcaatgctggtgcttggaagtcctcacttgtaatgcatttttgttcctgttgcaatttatatcttatttcatttcattcaaccttagtgaagatggagaacagctgcttactaacctccttatgttattaagtcaccactcagacttttctcgtagcaaaagatcagatctcacaacctttcttcataaactccaactttcaacccattaatcatttcccttggtctaccctggacctcctccaagatttctatatttttctgaaaatgtggagccccaaaccagacatgtgtgtgaaattatccagggctcaggaaacacaggagtcatgaattatctggacacagctgttgggaaaaactaaagggaagattcaatcagattgacaaatcttccctttgcaacttggagacaaagtagtggttgtttaataaaaagatgagccttcataacaaagctacgtcttctgtccttagcttttaaatgaagcattattttcaaaagaaacaactcttgaatagaacatttagctttcactgttttccccctcaacaaaattgtttaagaaacagtggcttttctgtactccatttaaaatcccaagttgtagacctttcacatttaaattggatttgtgctttcatattctcaggtgcttattatatactgatataatttctctcaaaggtaaggtctatgaaatactacactacttttgaagctttacctttcacctaaattgaaccatttcttttcatttggtctgcacacaaaatccagttagaataaagtgaataaaactaagttgaattcagtaaaagagaattatgctaacctacatgatacctagaatcaagtcttcataaattcatcaagtatgtctccattatggcctaacaacccaatgagaccaaatcatgggatcagcagaaatattgttcccattactcaggagatattctatggtgtctgtaaaatcagtccaattggcctaagaagacattaaaccagatatagaataaagttagcactctaaaaagaaatggggtagcagaggagaatgtttacttcctcttcataatatcgccttgagaaattgtccagggactttgtaaccaaaaagagactgctgcaagtgtttgctgtaagtaggtacttctgaaaccttagtcagccagtgagaggcaccaagaagttataagtctagttggatataggaaaggctgatgctgatacagaagaataggacaaatataatgtttcataaaagttgaagacagagagatggggtggaatggggaatgaattggtgagagtacagccattaatttaaattccagcccctataattgttttttgtttggttggttgtcactgccatgtatgtactctgggaaattacttctttttttgctgcttggacagtagtcatgacctgggaatggggggtggtgtgtgtgggaggtgaggtactatacggctagatatccaattttggaagtcagatgtcgacgccatgattcagactaaatatatttctgagacacaaactaagaccatagtcagttttcctcaagatagtttccatgctgaattagaaaaatgaagaccaacacttcctttattaccagatttcatgtgtcccccaaatgcagtaaaatgtttaatattgaggatcttttatttcataggcatgttttcctgaaggccttgagaagaatgagccaaacatatgaccatccactggcctttttaatttaaataagttccaagtgtaaacaacttaagttagctttgcattgtttgtccctttatgttcatactaaatactgatttgaactactattcccacataatattcttatagcattataaccagattgtggatgtagatcatgttagaactactttgcaagccaaatttccattaccttccatcttgtccgcacacaaaaactaattagagcaaagtgagtaaaaataagttgaattccataaagaagaatcatgctaatctacatgatgccaatttatctcaaaagtatgtacaagtttgacatattcttgactatttcctagattaatttttttctaatttttttttattattgtacttttggaaattcatattgttatttatatgattttgctctctgtttctagaaagaatttataaaacatcagatttactcttaattaactgatgtttataagagcacaattttagaagagtagtaataaaagttaatcacaaaagcagaattatatgtatggatattatatgaggaacaaagaaattgctccaaagagtatttagttggaatataaggtggttttaaaaataaaaattttaaatgagcaaacattttctaacgttttaagagtagggatattaatagatataattaattttagaattcctctttttttttttttttttttttgatacagagtctcactctgtcacccagactggagtgcaatggcgcaatcttggctcactgcaacctctgcctcctgggttcaagcaattctcctgcctcagcctcccaagtagctgggattacaggcatgcgccaccacacttggctcattttttaagttttagtagagacggagtttcaccatgttggccaggctggtctcgaactcctgacctcaggtgatccacccgcctcagcctcccaaagagctgggattacaggcatgagccaccgcgcctggctagaattcctcttttatttcttgatcactttagggaaaatatattagtagctgttgttttcttggggtggaggatcaggagtgaaaagaattttgtcgctgaaaatcaaataaagctgttgtccaatctcagataaaagaaccaaatgaagtaactctgaaataagtaataatataggaatcaatgaaaacttgaagtttcaagttttagctagtgtctcaatagtcataaagtaactataggatatttaagaagtataaagtataattagttttgtcctaccattttgaaattaataatatctgattagaatgctattaaagtgttgttatgcttatgttttagtaataatctgtttttaattttattttgaacattaaagtaactaaaatcttgcacaaactgtccattgtttccttttgatgtgactattaggaaacagaagaaatatctttgtcatatgatattattttaaggcccagatagtagtcaaaagaactttggtcctaatttaaaactgtcagtttctggccatgtaacctgggcaagcaacttcactagcccaagattgttcagatagatatcgtaagggccatataattgtttattgaataaattgagagatctaccactgtgcacctcagttgcccaatcaatcaaatgaggtcagtgggctacaaactgagtttgctaaagctggcaacacattcagaccttatctcagaaagaagagatgatttaggtgatttcaatgcatgaagggaatcagtgaactagatcatttgtaaggtactttttctatctaaatttgaacgacaagtttagtttaccaaatgatatacagttcctgagccaaggtaaggacttacagtctaccagccatcatattacttagttatctctgacaaagctttaggtggactttttcatacatcaaaatgtccttcaagattatccttttttgctaggctgctttcagagctctgggacgtatcaaatccattatgtgttcatggggtccttccctgaataaatcagagtggaggtgggatgaagtctcttcatagacttccgcatctttgattacttatatgcctttggcagctctgcaaagaccactgacttgtgtgctaagacataccagtatgcatccaatccctcatttaaaaccacatctttctaggaggtgctctctaggaggaagatggatgaaataaatgtatcaggaagatgcccaagtagatatgctactcccttacccagaatatatcccagcttagtttctagagctagtatccagagttctgagttggtgcaaagacacaaaggacccagacaccaattcctggcatgctcccaaatgagatgctattttcaggaaagttccaagtttggagtggatcctttggaggaagagcattgaattgcacaaggaaagccaataaacattctagtccccaacagggactataagccttgtaattacgttttagactgtgcttgtccatcctcttcttctccatatctgtaaacaacatgttagctttggaggtttgtcatccactgtgtgtctttggagagggtgttcctcatcacagcatctgcagtattatagccagtaacagttcgcaaaggcaaacttatgaaatagcttctaaacatactaaatcctaatccaaacaatttataacatttcttactcaataactctcagaagtcaactaacttggaactgccctaaacaagttaagaaaggagtcagacatcatccattgggttaataaactaaagtggaaggaagaacatgcaggtgaaaagtttcagattctaatctcttcagtgactatatacttatgtctggatcattctgtatcttgatagtgttttaagtgtgatgataattataataataaaagctaagattgaatagtgatttgcagattagtgattaaaaaaagggctttgacattagacagacctaggtttgaacccagctttgccacttattggctctgctaatttaagatagttaattaattactgatgcctcagtttccttatctttaaaagaaaaataatcgtcttagcctagaaagattgttgtgaggattcaatgaactaaggaaatgcagaatgctcaccatagtgagctcaacaaagttagattttattattaatgtatatgatcctaacaaaacattgtaatactgtttccattttatgattatgaaaactgggcttcaaaaagggtaggtgacaattagctatttgaaaatctctcatcggttagcaaagatcaaaatgattctaaagtagcactcctggaaatgaattgtgagactcatggccatctcaaagagttgtggtcaagatcttgtaagaaaatgtgtatgtaaaccatctgataatgggagacccagattaaatctgggtggtagctataagatggggaggcacaacttcataatggactttggaaccagaaaactttgggtttgaagtttagcttctccacttcagattttctgtgttagtttgggcaagttacttaaattctctgagctctagttttcttaatctatctctgagagttactttaagagttaagtaatatatgccaaatacaaaacaaataacagcactggatgaatgcagagtaaatgtcatcccacatcattataatttcccatggtgtagtaatgacaaacaggaagagtttcagtaatctcttgggttagtgaggtcagaacaggtatcttaagcaatgctgagttaatgaccagaatctgaactttttatctttttcaatggagtgatggattgctagggtaatggggttgtgctggtgatgctaaagataaacgttagagtaatagcaagctcagtcaatagaaacatgcttaccataccctggccttctcagtatttggtcctttccccacttgacagcttgtctaatggcaaatgtgaattttaaaagttttctcccaatgctgatttccttttgccaggaaggaaacaacaatggctaatgttgacatttactaaattaatatttctgaatctatgctgtgttaataagtgcttctcaagtgttctgttgttaaatatgtgtgggaaatgttacacagtagtacttgcatgctttctcaccagtatacatcacagacaccttcatatcacgtcagttttatagatatttcaaaatacattgatacttatcattatttcaaaattataatatttaccttgctgttagatcttatttaatgtattaaaaagcatatatattactatatcacacaatatattattttaaatgtttttataactgtacatcaatgccactggcttcctttgtaatcttatacatttatttcattcacttagaatttttttttttttttgagacaaagtctcactgtgtcatccaggctggagtgcagtggctaatctcggctcactgcaacctccacctcccagattcaagtgattctcgtgcctcagccttccaagtagctgggattaaaggtacatgccaccacgcccagctaattttttttttttggtaaagacagggttttgccatgttggccaggctggtctggaactcctgacctcaagtgatccacccgccttggcctcccaaagtgctgagattacaggtgtgagccgtcgcgcctggccccatttagacatttttatgagaagggtttacataagctttaccagactgccaagagagttgagtccatggcatgaaagtcattacagtgagcaattctttctttctttctttcttttttttttttttttttttgccaggctggagtgcaatggcatgatctcggcttactacagcctctgtctccatggttcaagttagtctcctacctcagcctcccaagtagctgagattacaggcatgaaccactaattttttgtatttttagtagagacagggttttgccatgttggccaggctggtctggaactcctgacctcaagtgatccactcacctcggcctcccaaagtgttgggattacaggcgttagccaccacactgggcatcagagcaattcttaaacattgattatggaagttattggcaagtaagaagtccttagcggaggaggaaggtgaaagcagaagaaatcattgtttcctactaaagtagccagaacaacaatgagcatggaaggtagagaacagtcaattcaagagcccctgtataattagaactccactgtgacttccctttttatttctcaattttttcccacattctctttcttttctctattcactcacactgcaatgccctatcccaaaggctttggatgtttgtgacacctttctgcaatcacctaatttgtgtattttttccccacagtaaccttgttacttagagacaggaggtggttgatatatttccttgaagcgggaggaatcaattctaactccttttggtactgatgagcatggtgctacaaggaaatttctagatagcataacattataacattcactctgggaacaaagatctcagagcattttctgccgctatttaggaaaattgttggatcacctttcccaggttgcgaagattttggagtggatttaacattcactcaaaggttaaaaactttgacaaagtacattttacttcctgtagtggtctgggaaatgcccagagtggatcaaaatgtcctatacaagctacagctttctcccagcttcaggctgaattcttaaatccagaggttgcatgttactaaactgctggtttttagacactagactttaaagattttttatttttaaattaatactttgtaatacattttgccatttgtctaaaatagaattcaagaatgatgtctgttatgcctagtgcatcagaagttattttaaatatgacatctttataaaagtcaatagctgcctcatcaaagggcaatcatgtctagtgtgggtggctgtgccaattgtttttgaactactgcagcaatctagccaatcccagggaatggcttgcagtctttctacacccacattttttttcttaattatctccaccaggctgagttagttaaggacagatctatagcatttcctggatgtcaaaatgcccacacaccttctgcaatccttgggctacctgcttcctttcatgtttcttttggcttgtccatctaattatctattatcatgtgtatataatgcattattcatgagacccaggcaatttcaggatgtaatatttttgattttaaaaggaaatgacctgaaaaattataacttctgcttgcacaaagaaaataagcagtaaatttgatagcaggtcttccatcgcaccacctgcttttaaaaataatccgcagaaatttgagatcattctctaaattaaaactttcctagccatcattccataaatgaacaggttcaacacctagattccttctattctgggttcaaatatgttactttgatttttttcatgatatacttcttaacaagttaaaaatttgcggtacccacccagaattgtaaatcaccaaaggttagggtaacttaggccttaatttcccctacactgcaagaaatagttatagactatatcttttatatcactcaaacttggaacggaagtggaatttagagtttattctgagaacatctcttttgttttatgtgtgaggaagcagagatcaagagtgactgattgacttttttgggtactgacaagcggttggaagtaaagcctaaactcaggcttttaatcttattcactgtgttctcttgaaaaaaggaatcttatgagtccagaggtctgtccccttctaaggattggagcaaataaagagaccagtctttgtctctaggccacaagatccaccaagatagggaccatttggtcttgcttgttcttgaatctccagattgtaatacagttcctggcacataatggcaaattatgtgttgccaattaatacttacaaaataaaattatgaatgctagagtctctatagaaagtataccttttgggcaaaatgggaaatgatcagccaagctcatgatccacataagtatcagaacatctaccaagataaacaagtacccagtgtccaagactgggatgaaattccagaggattgaaacaaaacaagccagcatgaattcatgtatcagatatgagctgggctaagtgacctctgagaaccttcccagaacccagattctatgattcacaagtaaaggtaatgtacatcttggctttggttcttcttattctttgtatttgttttttggggaattagcaactatgacttagatggtatgtcaactagaggaagagtcctgctttctttgagtgtctaactgtgggagagggaaatactgtcttaggaagactagttaaaactttccattaggcctgaaattttgaaaactatttgtaaaaaatgtttttaatttaattaaataaatcaaaataggagaaaataatgcctacagctccctctgatgccctagtggagtttaaggcagcatggtctagagaggaacaaacacaaatttccttaaaatttgaagaaagactctgagttagtctttacatcttactggcagtgtagtgttagataattctgcaccttactttcctcatctgtaaaaggtgattggtgattcctaccttacatgactgataaggaaatcaaatgaaacctatagagagctgtcaaagtactatatgaatctaaagtgttattactaggaaatacaaataaagtctgcactatagcagaaaaatctcttataggattgttttataatgttggaaagaaagcagaaaaaaaatccacctgaatttttaaaaagtcagaatgaatactccaaaaattgccaaatgagattagaggcagggttaaagaattcatccttccctctctgcaccatagtgttttaagggtattaatctttatgaaacacgtgtatctttctcaaaagacacttgttaaagcagcagctctacattccaaagtaaaagaggaaagatgtcatatttttgaaattataatcacctttaagccaaaaaggggaaaaatttttttgttgaaaaatttaatctttctttaagacctctatttccatagcactcaatgatggtaagctttcactagatgctaatgtttatttttattgctaagtagtacgcaatgttcttgacatagattatggcatgtaaatttaagagactcactgcttgttaaattcccactagaaaacacacacagagacacacacgcccatacacacacacacacagacacacacacacacacacacacacacacagcagtagcagatcagcagagaaagacaccagccaaagaaagataatttgagatacttctgaggtagcagttgtaaaattaaaataagcaactcattaaattatccatagagtgaaaagaaagctgcaaaaatagatatttttctggcaagtcagtgcttttcagaataaatttagttttcagcagagcttttaaatctgatgatatcagttcatattcattagagttatttaagtggttagactagtttgtctaattaaaaccaaagagtagctttactggcctttgagagaagtatatttaataaaaaatatgctcagttagacatcattttaactgacagattgtaagcaatatgatcgagtgaatgttacttgagcaagtttgagcctggtcccaaaattacagaattacaaaataaaaaccctttgtaagtcatgctttaatgctggttttccctcatttctgtttcttggctgattatctattttgtggtcatccagtcccttgccttctctctcgctcactgcctgattttggaatgttgtttcttactaaagcttcccctagaggacaggccaggaaaaggaaagaaactaaattcaccagcttctcttcttattaagaatttagatcagaaatctgatagggaaagagtctggcaaatgaaaggggaagcttatttatgttgattttagatctttaaaagccttctttccaatgtacattaatagacaattgaaaaataatattttataagccaactaatcacttgcttttaaaatccccacttactaccttgagcatatacattagattatgttttaaaataactagtactctggttcagtgaaatgaaaatgatatgtgcaaagagaatgtcataatgatacctcccatttatggagtgcctgcttcccagtttgcaaagcccttatatatattctcttctatcctccaaaaattgctgtgttgtaggtcttactatcaatgacactgaaaaagctactggcaggatgctcatattctcatctgaatcaatactggtatactccattgggggagctagaccaagctaaaatctcacatacagaaatattaatatgcaagaccaaggggtataaaagtaggctaggttactgttaatttaatagcatctaggttaaaattctctctctttcctctttcttcccttcttctctccatcaccttctagtcttctgactgattccaaacaggacaattgaaatgtcttgccttcatgctgaagagctctttgtaaatacacataaacagtgaatatcaggtgcaccatttttaaagtgctattcatttccacaacagtttaggtgaaaccatgtcatcttacaagttgagtgtgtgtgtgtgtgtgtgtgtgtgtgtgtgtagaggatgacgtgacacttttgaggtttatttaagttgttaaagacctcaaggttacaagacttagactgttaagcatttttcctcccagagacacgaaatctacaattttctcgattcaactgtcaactaaattggcaagtcaactaaaaggataatattcccttaacgatgcattcatttgaagccctagcaactgtattaggcagcagcgagtattcgctagcaagggatggcgcggggagagggaactctgcaatttagagtgacagatgatttctttcccatccatcaagctgcctcaaaatgtcacaatatttacacctctttcttggtgaattagaatccagagacaagcagacagaaagaaaaaaataataattccggccggttgccgcctgattggaaaaagcaagcgttgcacctttaaattctgctcctccattccccgttccgcacaccacccccccccgcccctcccgggattttgcaataaatctcccagttctgcgttcagccctgcagatccgtatttaaaacagcaccatctgggaagggtgggtggcgatggtgatgcgggcgccttggagttcctttgcagcacgcttggaattgcatcagactgatcagaaatccccccgcccccaagctcagcccctcccgccacgctcccctgcccgcccctcccctcccctcccttcgcgtagatctgactgagaaaacgactggatctcggaacaatctgtgccccattcgctgcaggcttgctccgtaaaccctgccctacgctccctttgtgtgccgagcagcctatcaccgtcatctgatcctagcgcctgttttttatcttttccttctgaatttccacaatatcctcgcttcgcctatgaatccacctgcgcagagttgggattctttctttcgttcgttaaaacagtggtcttgagtttcggaaacagatttttcctacgttcccctcacccctaccccaagctcttgccttttaattaagaagagctgatcgggggaggagtccagaacgaccaaaccctggggcgaaaactgccaccgggcttggctctgtggccggaacaaaaggcctgagaagggggtgggggtgagggttataggagtgtggagagcctggtggcccccgcccaggggcgcctaagtccctgagctccctgaagagtggcaagaggataacgcagccgcgcgttccggcagttcgctgtcccccgggggtgcaggcgggggcgggagaggtagaacacaggtctgggcggctccgcgccgcttctatctcacccgccaagcccctcacctccacccaccgccagtcccctgcccacccgggtggcggcggcggctcagcgactagccggccgccctccaccggcgcctccggacgcaacctcgccctggcagggcggtctgcgcgtccagctgattggtggctctgtccagccgccgcacggagctaaaagtgttcttctccaccgcctccagccgcccaggccccctcgcccggcccgctctctggctcttcggtccggaaaggaccttctactcccaggcggaggctcccctttccctgagttaccccgactgactcggacctgggctcagtgaggcatccggcccggctggggagcggagcgcggtctcggcagctccccttcccttgagaaagcgggaaccctctaagccagcgcccgaaactcgcggggagggaggacagaagggaaaaaaaaaagaaaacccagaaagaagcatccagcgaggagcgagggcgacggagaggaagagatagaatgagggagggatggaggctggaggagggggcggggtggaagaaggggggcgggaaggagggagggagggggaaagagagggagggagggatacagagagaatgaatccttctcactagaagagctgaaattaccttgattcatttttttgtgttggaggtttagctttacctccttccctcttcccaacctccacctcctctccccaccgcacaccacctccaccgcctgattctaaatgctacaaagtcaaattttaggaattcgaatgttttgcaaaagcttcataattagtaatgaatctactgtacacacacacacacacaccagcaaagagaacggaaaagagggaggtgaagaggagaaaaagagagataaatcttacatttgaatcagacatttgcaggtccaagttaactaaactcattatatccgcaggaagactgagtttcttttttttctttctccctttgccccagggttctcacctagggcaattcaaactgggcaaataccaagaaacaaccccctctcatgctctccctctacctcctcccctccaccacgcgtcctctccggaagacagtatcaaaatagctcaagaattggggatgcaaggggtccccgccctggtgcttaccttctttgcggcttacaccaccccggtggctagatcctggagataaacacttgcatttcccaaagttaacccagtataccaacccggagcttgccaagagtctattccagcctacaccgctaggaagccaacttcagcgagctcaatgaggggaccaaactggggctcgctttccaaacgctccgctccaaaatctgactctctctccagccccgatctcagtgtgagccgaacctcagaaaagacgctttttaagggcgacacagggttggctttacagcggggccaagaagactacctgggggtaccgccacctcggacaaatccgttggctctgtccaaggtgctgaatggactcctatcgcccggattacacacccggcacagcaggaggaaaaggcttaaaaatctctaattaagtgatacttgatattgctctagacggtttcttccacttccttacggtttgtcacgtgcggatggctttgccaaagccatcctgttaatagttgatcacatgttgatgagaaccttttcttctacgagaggattacccattaccggtgatatgcacttctgacttatttctctccccccaaccccaccccccatctacacctaaactcccagtctttaccccacccttacccccactccaccccctaaccccaacctctaacagcattattgtttttagatggaaattaacccccttgcaaatgtcaattacatgcccacatataaatcatagaatatgatcatacaccatacacattaaggaaaagaatagaatgcaagactgctgagagacaagcatcagccttgaacaaccaatataacacacacccccccacccagctccaagtttgttccacgcagttccacatagctgtgtcaaatctcaaatgattccaattaaagttgcactgtgtaaaaacccgattcccctggcctgagtagctgctgttctttggcgtgtgaagtgctaggaagagccgtgatatgcccgttgttaagcaacatgtcaagatttttcaattataatgcaggttttattgctactcaccattgtgcctttgctgtcctggagactcaagtgtcttaaaatctcgtctccccaacagatgctggaaggtaatgtgtcttgtttgaagtcatcatgtgagaagttcggctttgctcagtggatcgcccaccacttggtgtgacttatgaatctaataaccctttgcaatatccgcaagcttaaactctcaaccaccttggcgactacagaagacaaagcaactggcatcgatgtcgaaaaacctatagatttacgcaaacgccctcactccgagagacacgtttccttttgagttcttacgtgattctaatgaatgagcgaggttaccaatgattgcccaactgccctgctatgtagcaggtgtttcctagggctgccttctaaccgcccgttactgggtcctggcactgaaagttcccagagaaagtgaggagtttcagggtacccctgtaaaaaaaaaaactcagcctgcacaccgctcccttgcccactacgcaggtcacacctggggctccggcgaagctgaattcggctcgggagatttccctgtcgccaggtaagaaaaccttcgccttgtcaggctagggcgggaagaccgctggggaacttgttgcttatcagcgccggcagactaccgctttaataataataccagaaaagcgcagcagggagggggtggggggcggcaacggcgacgactaacctcgctgtttacgtgaccgactcactgtgactctctgggtaaaaaaaggaaacttcttagaaaagttcgtgcccctccccctcccccatcatgactaagggtctccagccgatgaggtcgtgagtgatgatcaaatggggactggggggaggggggcgagtaagtgacttgtccttgggaacatctgcatgcgtcgaagcgcgaaccagcccaacaactttcccttttcctcttaggtactgatgactaggcgagaggcaccaaggcgagccactagttgcccacaggaacctgtgtaagccgagctctcgagcggctgagttgaatgaagttatgactgcgtttgctctaatgggttatggcttcccaaatgtgagttaacagccccggtgcgcagctaggtcggaaggcgagccgcggagagcggagccgcgggccaaggcagggacgggaggggaggcggcaggttgggcgctccgctgctgctcggtgctgcttccccggagccgcttcctcatcctgcgggggctgccccgccgccggggtgccggggtgagcgcggcgggagccagggctggggtggcgaacctcggagggggctctcccaggaagccctgcggttagcgcccgcgcttccccaccagtggctgcgcaagctgggaagcgaagaggtcacgtgttggcggaaagtaacttggaggcgaaaggatgaactttgagaagaggaaaaaaagcacaatgaaacaaactacccccttggagtgtctaatagagggggaggcgggagggggggcggaggggcgccgctctccgcgggagatgtggggacgactccggaaatctcgggaaataggcaataactcgagctttggcaacgtcccccagcctagggaggcgctaacgcaaggtatctttccactgaagctgccctttgcctaccctcagccatcgctagcacagcagagcagaagaaccagggatgaatgtagaccagttgttatggagatgtccgtcgctctgaggagcgctagtgccctgggaagtccccagacgcatttcaggtttcgtcgttttggcactgacaccatgattttactcgctctgagttcccaccaaggggagcccaccaacggcgtcacaggccctggccgtggcgctattgactgcagggatgaggcacagcgatgctgcagaagatggtggatagctcttaagtttcagaccacccagccctttccaatttccagtttctttattccagtcaaaagtgctttgtttgaatatcattcttgcttgcttatgtagaaaaatcttacttacacgataggatgattagaagcaacagaacataagcattcagtggctgcttcaaggtcctccctctcccatcccagaaatgccttccttatggaaaataagttttacttcccaattatgtgcatggacctctgttcattgcagcccccattggtactgggttattattattagcagtaagtctagtgttgagttcatgcttctctagaaatgtttccaaagtcaaacaggcttatcttaggctccagataaaatatctgtatacaaaagcttcctggttctcattaggagtagttctagatttgccaggctcctggagacctgagatgggtccttatgaaaggatttcagaaaccctcacagtcatcaacacaacagttctcgccaaatgaaaggactgctcaaattgcccacaaactgccactttttgtccatccatgaattagccagcagatgctgccctaagactgggacagctggtacataccattctcagaggtcttggggtacaggctttgtggacaaaactggttttttgagaatggaatccataatgctgttaataactttccttgcctactgacaaattcaatgactagcacagatctgcaatcttgaaaagacataaggagatgaccactgtatatgaacatattattccccattgccatcaatgtgatatatttttctgactcttttgtcaacagtttgtggtctgtatagaaactatcagctactcctctgctggatctttattctgaaaattatatcttacagtgggataccctgaattgttggtgtaggtgcctgaggattcagaacatgaatgactgattagtttgaaatcatttagacacatgattgtactgaagatatttcccaagaaatatgtttaaccagtgctcttatttcttggaaccattactaaaacctccaactcagggaccaaaatgatggacaagagttgctaaataataagggttgatatagggagctagggagagtggtgaagatatggtgtttgccatatatctatatatacctattcccactttggatttctcagtgatctgatagacaattctcttctcttggtgcactatcaactctccaaccttttatctccatccactcacttacataatttttttccatctgcagaaatccagtgtctaatgtaagtaaagattgccataatttcatttgttaagatagatgccaagcactgtatgtgtcacaattttcatctcagtagcacttattcctggggttatcttattttttcatacaaccccaatcagctgtgatatgaatatcacacttctctggctcatttgaccccatttatatttagtaatggcaagaacatttcagactgaatagtgaacaaatcttattccttaaggatcactacctaacaacatgaccaaacttaaagcaaaatgtattaatacaacctagaaggaaggatttttgctttcaaaatatgggtattgcactccttatagatgagctgtttaatattcacagttttctacctatgccacagttataaagcttgttctttgcccacatctttatgaagataggttcaaaaattaatacgaggctcatcagtattaggaggcacaaaaacttcactcagtagatgtgtagtcttggaattggtgggagatgggtaacaaagcaggagtctacaaagtcagaaatgaaagagaactcctttttcttagaaaactaagaaataattggagtacctcttaagacaaagtccactgtctttatttctaaaaggaaattcagtaagtcacttttaataggatggtttgtgtattccttactatatatcaaggaagacaaagatgagatagtacttccattcttttctcccaacttgtctttccaaatctatttggttgtagttaatttccaggctctccatctcacctggagttggatagattatttccatccttccttcccactcttacttctccttccttttcagtacttattctgtgccagggactctgatgggactggtgatccacatgttaacaattctctacctaaagtatctcagaagttaaagagtgcttggttaataatagctgagaggtcaacagtgccttccccttcattacctcaggatcacttgttacaatcaatgcagaagagtagtcacagagaagctcctgatggtgatataattgctatcttggagcctaaaaaacaaaaaacaggtagcaaaagccttctgtttatgatataagaagagcttctgaccaggtaggaagaaagattggctctcttagtcacttcctgatctctaatggttctccacaggtaatagaaggagaggcaaagaatcacgacacacaatttggaaagccttctgaaagcaagaataggcaatgattgccaagaacctggtattgagctcatatttaaaaagaactcaaagaatcctcaatctaccaaacctagttataaaggaaacaatcaaaacttcaaaaagaagtaagcaagagaaagccttgggaaagtcatgatttagtttgcaataacctctgtgcatttctgagcctgacaagcaagcatgagacagaagatctggacatgacttaactcaatttcagaacaccagacaaccctataatgaggctgaagcaagaccacatggaatactgaggaagaactgaatgactctttctaaaccatcttacagaaaagagatgaataagaggaagtatgggtagcaagtaagagagaagtgacattgttaatatgaaaagttgacagggagattaagatgggtcaagagcatgtcaggtcaggacttgcaagatgtacttaactaaatgtaagttcatattaggaattggataaaatgagaaataaaaactccaaggagtcacaaaacttaggatcatggaaaggcaagtgaaaattagtaaaaagagccaattttatatcatgatagggcctaccaaggtgtgcttgacatctaatctgcctagaacatctggaaggaaactttcacagatgctaaactgtgcttcttataatttaatgtgcacatgaatctcctgggcaactctttagaaagcagattctaagtctggggacagcatcaacagttggcattttcaacagattcccaggtgatatgaagttgtgccacattttgcacagcaaaatactaaagcttgctgccccagcctatggtttcatttgcattatggcttcattaatacacttcattagtaactgaagtgaatgctatataacaaaaaataattcaaggaaaagacctgttcctttaactctaatgttacacaaaccacagactctaatttgctcctgaacccattaattctagaaagttcttaagcacagtggacatcaacctcttattatcagtaacattggctatagtttgaacatttatcattttgtacctattggagtaaaagaaaagagaatccatttggaatatattgggcacattgcacaatggaaaagtcagggaaaattattctagtcatgtaaagaggattggttaggtcatattctgagtcctgagctcattctgggtttctttctataaataggatattttggaactagagaaagcacagcagaaggcaaccagaatgacagagggatttggggaatttgcttctgctgaaaggttaaggaaactaggtctgttttcttttgtaaggagagaaaagatggtacctcactgaggtgatatcattctaaaagtagtggaagtaataggatgagacaagagtgccttatggaaacaagagtagaaggattctggcaaggaatgaaggccagaagaatggctctagcttttctaaaggccctcagttagcagtgttcctactggcagaactccactactcgcaaaaggaggggtaaacactagattgggatcaggaaataagtgagagagagaaaatgaggaggcagaggggatcttatgtcgtttttcattgagaacattttcaaacaggcatttattaatcctatagaagccctgcactcaaggcatatggtgaactttaccaacattccccaagctcaagggttctgcttctgtaacacatcacatctctgcttcctcttcatcccaaaatggcattttgtccatcaattcagcaaagaaatgtaaatagttataatatgcagggttttccctctaaattactttttcctcttcatcaatcctggaaaacattctctttttattttatttatttatttttagagacagggtcttgctgtgtcacccaggctaaagttcagtggctcgatcttggctcactgcaacctctgcttcctgagctccaacaattctcccacctcaacctcccgagtagctgggaacacaggtgcatgccactacacccggatcatttttacattttttgtagagacagggtttcgccgtgttgcccagtctggtcttgaactctggcactcaaatgatcagcctgcctcagcctctcaaactgctgggattacaggcatgagccactgtgccagggctgattctcttttcagttggtagaaaagcactgtccatgacttcgcatatgagacctcaacatcttcatttgatccctgaatctcagagatgaaaggacttgccgaccatcctgggctaccccataattttacagcaggggaatataaagctcatagagttgataatcatacagattttacgtgtatggtactggagcatatatgctttcgggaaactgaaaattcaccagtgagctatgtggaaaatgtcaattattccatgagttagctcactactctggtcctctgtcaaaattgatattcagctctgtgtctttttacttggacagcctttgaggggagttgctctatgtccactgctttaggtagttgacccaaacttccccaaaatgtaggaaagttggttaactaactttaggtgggttaagcaacttttccatagtcacactgcttgtaagtagtagaggaggaattaaaattcaggattttcagatctaaagttcatgcttttaagcactggaccatatttacccctcttgctttcttcctttctgaatacatacatttttgcttttgttgcagtttgcttgtgttacagtattgggacaagccagtctcacttaactatactgcttccctctctcccaatactttgactgctatgtaatagaaacttaatataattttcctatatgaattagaatcaaactgcttctgtttatctctgggaagacttgttttctaactttatccagcacagcagcatagattgcaatgcaaggagagactgaagaacaatggtgatcaccaattgccgtatgttctggggaggcttaaaccacttctggagcctccttttcccccacctccatcctagaaggtagcagatgcatccttgaagaggcctcgacagaacctaggccaattcgcttctaagatgcaggttattcttgaaatctacaagcagcaaatcgaagatggggtatacactgcaaattagggggcactaatgcgatgactcaaagtcccagaatgggcctgagtgtgcagatcactgtggagatgttcccaaagtcttgacagatctatgttaaggcagaaacaaggacatcatattctccaatattactgtgattcagaatctaaatagtgacctgaatgccagaaatgtcagccaagaaatgggaaaaggaatgggcagtccagagatctgggcctgttgagaagcctatgaacccagtgacttggaataaagacaattgggagaagcctgaaatttcaagagaaaaagaggaatctctggccctaatgctgggcctttcttggtgttccctgtctctgtactctatttcctacctcctgtaagacaggacatctcttggaatcatctgatgtgttggaagggggctgggagggaaagagcattgatgctgactgtgttacaagctggatcgtctgacgctggcaaaccattttctttctctgggcctcagtttttccacttatatagtggccttagatttgacatttgttgtgggttgaattgtgtcctctctgaattaatatattgaagtctcaacctccagtacctcagaaagtaaccgtattgggagctgggtctttaaagaggtgattaacttaaaatgaggcattagggtggggctccaatccaatatacctaatttttttataagaagagagaaactggccaggcacagtggctcacgcctgtaatcccagcactttgggatgccgaggcgggcggatcacctgaggtcgggagttcgagaccagcctgaccaacatggagaaactccatctctactaaaaatacaaaattagctgggcgtggtggcacatgcctgtaatcccagctacttgggaggctgaggcaggagaattgcttgaggttgcggtgagccgagattgtgccattgtactccagcctgggcaacgagagtaaaactctgtctcaaaaaaaaaaaagtagaagaagagagagacaccagggatgcacacgcacagaggaaagaccatgtgaggacacagcaagaggacatccatctgcaagccaagaagagaggcctcagaaaaaatcaacctggttggcaccttgatcttggacttccagtctccagaactgtgagaaagtgagtttctgttattgacatcaagtgtgtggctttttgttttggcagctacagcaaacaaatacagatttcaaatggcccaattatctgccttccaatttctgtgaaacttccttcaacaagtttagtattgggagggattgcagttgactgcaaattctttgatagttctttcatcaagaaatggggttgtatctgctcctcccctgctttcgggtgggctcagtgactgctttgaccaatagaataaggcaaaagttacacttctagtttcctggttccaagccttaggagactcttcacttactcttcctgtgtcatggaatgcctgctcttggagccctggaccaccatgtaaaaagtccaactaccctgctggagatgcaatgtgaagcagtgatgagattacatggagagagtgaaaggcccaactgagcccagccttccactttgccctgctgagatgctgggcatgtgagtacaactcacttggacactccagaccagaccagccaccagctgaaggtcactaagtgactccagtcagtgccatgtgaaatgaaagaattgcctagccaagacctgccagaattcttattcatcagctataatatggttgttgagtaagccactaagttttgttacagtgcttgttaacgtgttacaatgatgtaataaaagtttctgaactgatttactagacatttgtgaccacattaattctgtacaggctcattcttaccaggtcttgttttgtgctcacggagaaagtaaggtgccattatgaagggattggggtttggactgagatttggattcaggtaagctctgccattaacaagtcacttggtttcttcagacaaataatttgacatctctgagtctcactttccttatctgtaaaatagggataatcacacctgctgtgtggagttttgtgaggacttaatgtgttaattagatattttattgctaggcagatagcatcctataaatggtaaccactctcactgcaatagtgatgccactgctgctgctgataatcatgatgaaaccaggtcatcttgcctatgactgccagtggagttggatgaaatgccccttccaaacaagcagccctcctcggtctgccagaaggctaaaatctcaccattggctttttcaagttatggcatttcagtttaaggactcgatatcctttaaatttccagttacacctggcaaggttaacacaggcaaaaacattacaaactggaaacagaacagcaaagtgaaaaaaagcatgtgatttaaaaaattttagaactagttttggttacaagtccttccagatctaaactaacagtggattaaatgtgttagaaatttgacttccatgtaaattacaagtaggtctggagccatatgatgttctatagtgtcagagacccaagctctttctgtcttctgtctatcttctgctgtatgtagttttattctgcatgtcgtctcatggtataacatgactgctgcttcttcactatcaggaaagaagactggttgggaaggatgcaccctattactttaaggacacttctcagaagttggacaaattgctcttgcttatacattgttgcccaaaacttagtcataaggccaaatctagctcctacatagggtgggaaatgtgaacttgacatgcatgtgcctagtacgttaattctattatcaaggaagaagagatgcttactggggaaaagaagtaatctttgtgacagttaacaatttcttgagcactatttcaagtcaggagtggtggtaggcaattcaggtactttgcagccctgtgagccttttattttattattttattttattttattttattttattttattttattttattttattttattttagatggagtttcgctcttgttgcacaggctggagtgcaaaggcacgatctcggctcattgcagccttcgcctcccaggttcaagtgattctcctccctcagcctcctgagtagctgggattacaggcaccaaccaccacgcccgactaatttttgtatttttagtagacacggggttttgccatattggccaggctggtctcaaactcctagcctcaggtgatccacctagcttggcctcccaaagtgttgggattacaggcgtgaaccaccgcacctggcctgtgagcttattattatcatccctatataagagagaaagaaagtgaaactgagaaatgattttcataaagtcacacaggtagttagtgcctgggctaggattggatccaggtctatgtgatccaaaatgcatactcgtttctctaaaacgaccctagtttcagtcctggcttgacgactttactgactatgtgacattgagccagtcatctgcccaagcaaaggcagctttaccgtgaagctaatgaaacatctcacttgcacagactcctgaagagataggagtgtccaggagctgcagagtattgagggtggggtggagggttagaagccagggagcattcaggaagtatttctatgtaagcctttcttgcagattgacaaagagactgaagaagaaagagacgtaacctctaagtctacaacaattttttgtgatttcttttcttgtcttttttttttttctttttgagacttggtctagctctgtcacccaggttagagtgcagtggcaagatcatggctcactgcagcttcaacctcccaaggctcaagtgatcctcccacctcagcctcccaagtatctgggtctattggaacacaccacaacacctggctaattgtgttttttttttttttttttattttttgtagagatgggggtctcaccatgttgcccaggctaatctcgaactcctaggctcaagtgatcctcccgactaggctccaaaattgttaggattacaggtgtgagccaccacgtttggcctcttttcttattctaaataaatatttgcgagatttgtgtttggacctacagttgtatctgtaacagtgtattcttttcttaaagaggctccccccaaattgtatatacttcagctctcacaaaacctggatccacccctactgccaagccaaaattcagcaaattttgaaagaatgaatttgagacttatcttaaattttgactaagatttaggtctcagaaatggcagagcagagaccctgaccaagaggacaaacccagaaggaagctatggtggggttctggaaacacataaagacagacctcccccagggatctctcccagtttcctccagagagggactctttccttctggcatattccaatcgccctgtaagtgttctttagctcattatacattctgccttctgaaaaattactaatgtccatatcaatccctccacccagagtagcaattgtcagaaagcagaaaccaggtatccttcatctctgtaccaagacttcagcaaggggcctgttgcaaaccaggaaccaataagtagttgttgaattgaattgaattgaggaacccatggatttaggaacataaaagagtgcacaaaagcaaagttactaactcatttctttattgcatgatgttttccagatctcagttttcttctgtgaaatgaaggcattaaatctattgatccctagaagggcaattgtgaacctgacagtagtgaactaattaacatctctgaactctatattctcagagtgcaggttttatgccttgaattgaggtgaaatccaatctggaagcctcatgttcattaaaaaagccttcagcattccttggaagtgtcagatgttggcctgaccaaatttcagcagggataattgcattctgacaactttgagttcccctgaactcttcaattgaataaggtaagcttcgcttcccatcccaaattattttaca

SEQ ID NO: 955 - DNA, 194952 bp, Homo sapiens
aaaccagattgttggcagaggacacaacaaaatgtaagttagaaaattcataaacatacatttattcaggaaatacaattactagaatccttgatatttcaatgatcattccacattataaaatattcacaaacatgtagttttttaagtctacaccaggtcatgctgacattctttttggataagccataaccatttcttctattaaatgctataatatccattttaattgtaaacaaagtacttgagccagactacttaagtacttgagcaaaataacttaaaaaaatcttaagaggaggaggacaatgatattttttaaaaacatatttgaggctgggcatggtggctcacgccagtaattccagcactttgggaggccgaggcgggcgaatcacgaggtcaggagatcgagatcatcctggctaacacggtgaaaccccgtctctactaaaaatacaaaaaaattagccgggagaggtggcacacgcctgtagtcctagctactcgggaggctgaggcaggagaattgcttgaactgccttgaggtggcggaggctgaagtgagccgagatcacaccactgcacgccagcctgggcaacagagcaagactctgtctcaaaaaaaaacaaaaacaaaaaacaaaaaaaaaatttgaatcgtcaaatcctaaagaactaggctgctattatctagtattatactaacaaatgaagtgcccacattaagacagtacataattattaacgacaatatttctcatctgcaatttttaaacatgctttctcaaataacaaacacgtatttttgtaagttttaaaggcaaagggggcagaatgatgacagacataaaaagctcacatttaaattactggtagattttattaaaaaaaagaaaaaagaaaaaaaaagataagactgtaattacttcccaaataaggaatgccaagtaccttttattcctaaaagaaattacttggccaggtgcagtggctcacgcctataatcctaatgctttgggaggctgaggtggaagccaaggagtttcaggctgcagtgagctatgatcacaccactgtgttccagcctgggagacaaagcaagatcctgtctcttttaaaacaaaaaacaaacaaaccaaaaaaaaaacaaaaaaaaaacctaagaaatgtaattaatcattaagtagctgcaaattgaactgttctattttgatacttcctaagagtgtccagtgtaatcagatcattttataatgggttattgaccctaggtgtcctttagaaccacctggaaagctttacaaaaaaaaaaaaaagggtgattttgatttagttgttatggaataggacccaggtatcaattttttaaagctctgccaggctaatatgtagctaagattgagaatcactaagtcaacacattttgatatatcaagaaaataaatggaaatgggggtgataatttatatttgtaatttacaaatcaaacatctatcatacacttactatgtacctagttttattcacgaatcatccatttctaagataaaaattcccatcatttcctcactgcactaaaccaccactgtacatctttgccaatgaatgactgtatttttctatggtcaagatttaaaattctgggatacattatgaaaactgcattaatgaaaacaacctactgctattcatgctcaacagtagcaagctaaactactgtacttggctcctttgagctacccttattttaagaattataaataggtgtcaacccacacaaagaacagattgtggattaccgtagggaaaaaaatagcttactcaacttactaaaagtttcaacaccaaaaaagatttaacttggctgaaagttctgaaacagctgagacacagaaccaggaagctataatttataatgaaatgttgatacatacttaaaagctactgcagctgtagctatactaaaataagatttcttcagggtttacttaccctgaaatgcaagaatacaagcataacaataatattactgtttttatatgcaccaatacctctctttaatatataaagctctacaacaaatacctctaataattttacaattaaattaagtccatacttctatactactttggtctcaacatttttaaaacatcaattaattttgaaaatttacaatttaacaacatgatcctatcaataacaagcacattttgtagtggattaaagacacattcaaccatgcaatccagtgttcaataccttaatgataaataacaatgctgattgacttttattttgaaaaatcattgaaaactggaataatcatctgagactcacagtgatcacaaacatgcagaaaaaagcatacaattctattcttcctgaaggaatgttacaaaatgcccacttttttatatagggtcaatatgccaaattacttatatttttcaatccatcatcttctaacatttgtcacttaaatttttcttaaagtacaaatgttcctgtaagttgtaacagaaaatgaaccccaactctttcagtctttaagacctcagtcacagtcccacactaatagctgccttttagtaaaatagtgacatccagtggacaaatgaaatatttctcaaattcccatatttgaatcataaacaaaagttgcctctttaaatccaacaattttagtatgagttcctacttattttgatggaatctacagattctcatgaatacttcacatcataatttctatgtatcttaaatatatcctcttttcttcctatttaaaatcaattatttaaattgagctagtaagaatgtctactcttgaagctagtgaggttaaaggtattacttttccttctttgcttcagctacttcccaccaccaaataactggtttgtctctaggaatggaaggactaaaatataggggaaatactgtgcatttaaataaaaatgaatagtatttaaaagaaatcacaaaagatgaaatctgaacctgttttgcatttataatttgatgtacggttgaacataaatagggatgtaataagtaatgctatcaattacatcctcttgcctcaatgctcaaatattaagaatatgtattttagcaatgattgtttcagtgtttaaaaacttactttcataaatcagtataaatgaatatccattatatattatgtttaagtaaaagtgaaaaaacttgcactgtactgagtcatgatttaccactggttatatatattatgtgtgtgttcaaagtacaaaatgcagcaatgatgttaacattgacagtgtaatgaactgccgtagatgagactgttatgcttaatttcttggaaaactgtaaagaaatttcacaggttaaaaaaaatagagtaagcaaaaaaaaagaattggagaactttacttttaaatcagcagctaaatgaagaaaacttttcctttctaaaaaaagattaagaatgtaaaagtacattttaatattaaaaaagcattttaaaaaatctataacaactttatgacaaaatctgcatttgaaaaaggcctgtaaaaacagtaggacagaattgccctcatcaccttttactttttcttgtcagaaaaaagtgtatgcatctctggaaccataaatgatgttaaaataggcatttataaaatgacaaggagaatttcatgataaatttgtttgttttcttacaatcattggcattgcagccattagtaagtcacaaggaaaacttctctagctaaaacgcaaaatgaaatatcaagttttgaaatgtattaggtctgttgcctgcgttttgctgatctcattttttcaaagcgcgactccatttcttctaagactttgggtgtgtatcgtaccactaatttaacctttccttgtgcggctttcagcagttctacagctttttcatgatgttctccttcaacactctaggggaaaaaaaaacaaccaaccatacactaatatctaagttttgaaagtaactcaaaatgcaaaaatgtttacaatatatataatgaagaaaagttttaatgttatattattccaacattacaaaactaagaaataatcctgccttaccattttaatctatatgaaatcctctcttacatcatattctgtttatagtctaaaagctggcttttaagttccaaataattagcatattaatctatatgccttattatttcagtagatcaagcaattggcattttataagagtaaaatgagggtagacttctaatttaatgtattgcctttaataaagagcttatgtcataaaaatgacattaagcactgctaatttacactgcaaaatacacttatagtgcttaaaaaaaaggatcactgtattaatagtactgcctaggattccctcaaggcatttctaaaccacaagtttcttaggtttctcctattactcaaatacgcccccaggtggtcacaacagatcactacaaatagaaataaaattcatccttaccactccattaacagagaggagttgatctccacgtttgaggcccccatgtctatcagcaattccacctggaattattcgggatatatagattggagagttttgttctttgcctcccataatattgaatccaaggccctcttctgtttttggtagctcaacaactcgaggatgagaatgtccttcactggcagcaaatgcagcaacagtagcctgaaagaaagttttacatattaaaaatatgacttttatttacttcagttctttcatcttttgtttccccccgagatggagtctcgctctgtcgcacaggctggagtgcagtggcgtgatcttggctcactgcaagctccacctcctggcttcacgccattctcctgcctcagcctcctgagtagctgagactacaggcgcctgccaccacgcccggctaatttttttgtatttttttttagtagagatggggtttcaccacattagccaggatggtctcgatctcctgacctcgtgatccgcccgccttggcctcccaaagtgctgggattacaggcgtgagccactgcgcctggcctcttttgtctctttttaaaaactacttttgagcacgtatttttgacgtctgaatgctcacaaattcactggtgattctgagaaggtaagctaaacagaaggtattttagagacgacaaatgaataatttcgagttatgcaggaaatgttacgattttttgttatgattttttaggtcattcctagcccattcagtgcccactcttttgtgcagtcctgtatgcgcagggcttggcaagcagacttactgggcagactgatattgtacatggtaaggaggaaaaccccttccccagcatgctagcagccctgggctttagatctggatctcccaactccttcaggagcctttgtgcaggacacaacctacctatataatcaacatggagttgcccttatatgtaatcattttggcttctgtactatttgtactatatactaaatatctaagatgtcaagaaataactcaatattgagaaaaagagaggtacatatagccaatctgaatgttttgttgctttagttaactagacacaactaaaaatccccacagaagatgaaacagagccgtatcttctttaaagctcaactttagactaatccaaactaattataaagttgagattttgtttcactttgctttaaagggtaattatctagtaccatttttttgtgatggatcacaaaaatggggaggaggaaagaaatcaagatttactgaacacccgttatctttgaagaaatcaagatttactgaatacccgttatcttcgaagctctgaaaaaggcctcatttttcagataatggaattaaggctcagaaattcagtaggctatcaaactcacacaactcagcaattaaaaccatgtttctctggtcttttctacactgataaactatatccacatgtttaagtatttgtattcaacaaagaatccaccatttccttttgtgagccagtaactatccataaaaaactatctgctgatgattaatttaagtcaccgactgctgatattaccctgttcaaaccccctatcatgaatagtgaggtcaatacctaaattatttgaggaaaacaatggcacagaaatgcagataatgtaaagaagaaagcaaaaatcaactcggggaagtaccccagctctatcatatgctatttgtgtggtttgcggcaaatcacctcatgcttcctcatcaataagatgaggatagtaattcatatcttaaaattctgattagattttgtataatgaatattatatagtatcatatatataacatatacaacacaattatatattgcatgatacatattgtatgcaagtacatttctattgcattatctaaactgcatgataaaatagcttatgtaagctatttatcatgcagcatttatgtaaaggcaatagaaacaaatgtcttatttcttagtacttgagaaatttggtgtagcttgaaagatacatgttagtcttcaaagtaagtttattatgaatttaataactccatattttaaacttctaatttatgaagaattcttacttttggaaaacaaaaaaatttacctttgcagtagcgttcgctctcacttcaggactgctactgatgtccacagtctcatagacatgttcatatacctgtaaaagccaaagttatatctcagaatataccatgcttgagttctctgtgaagttaaaatttcaggcaaagttatgcatctttataaaatggttttatcagaaattccaaaaatgagagggactggttttaatgttttctaaagtttttcttaagaaatgttgaacccaaatttagagtattatctgacctaattaactcaaatttttgtaaattttaatgatgtttactcacctctctcacagcattgcagaattcactttgaaggactctttgcaaagcctgaagtttctgtggtggtacttctccactcctttgtagtttttccaataattcaattgctctacaaatatctagagttaaacacacacacagataattttctccaagggttttctcaatgcctatgtaacagtggggcagttaggattcattcctcaagggcaaataatatacagacaatcgaggggaaaaaaagcattgaatttgcacatttggtgggaaggagactgtgtgtgtgtacacacatggagggtgagaatgtaaaatgtaagaacactaaattttacagtagataggaaaaactactgagattacagaagcataaaataagaccttggagaaacacaggcaaattgaacacaaaataccaaatgtcatcggaaaggactgtgactcaaatgtgaccgatacatgaacattgtactgcttcagaaaagctagcaatattgtcagaaactagtcaataaaaatttacctaattattattagtaaccaaagcactgaacagtacaaggcactataagctagtaaaatcactggtcattcctcgaaagaaacatgatacataggtagataaccactcgagagcagatgcagttagtggcagggacacatttaaaacaaccataaaaatgcaaaaaacaagcagtacaaatgaaataaactgattttttttcaacttaattaacactgttaattcaaacaagctccaacacttatgtttacaaaaaagaaaaataaaaacaattagctttatcaatctggtctcaataccacctgtgtgaccttgggcaagttacatgatgtccttatgtctcagtttctttcactgtacaatggaaataacagtaccttccatataagggttatgaggaagagttatgagttcagttaacaactgaaccacaaaatacataaaaaagggcttagcaagcaaaagtgttatgttacattggtaccaattaatcataagaaatattggctgggaatagtggcttatgcctgtaatcccagcactttgggaggccgaggcgggtggatcacctgaggtcaagagttcaagaccagcctggccaacatggtgaaaccccaactctactaaaaaaaatacaaaaattagccaggcatggtggcgggtgcctgtaatcccagctacttgggaggccgaggcaggagaagcgcttgatcccaggaggtggaggttgcagtgagctgagattgtgccactgcactccagcctgggtgacaagagtgaaactccatctacaaaaaaccaaacaaaacaaaaacaaacaaacaaacaaaaaaaaccctaagaggttgtatacatttatacaaatgtatgaagcacattagggaattctcactgagaagtgtgaggataagtgttttatgaattgagacattttagaagattcaggaagtcagctataacactgttaactatctctacttttatttttccaaaaactgttttggtatactgtttttgtacccctggtactacaatgcccagtattctattattgctttgcttccttttgacttaagtagaagttcctgatttcgttacactcaaggactggaaatttttctttatagagttagtatggccttcttcgtgtttgcagatagaaaactatgaataaatgtagtaaagaaagatatttatttatttatttgagatggagtctcactctgttgcccaggctggagtgcagtggcgcaatctccactcactgcaacctctgcctcccaggttcaagcaagtctcctgcctcagcctcctgagtagctgggattacaggagtccaccaccatgctcggctaatttttgtatttttagtagagacagggtttcaccctgttggtcaggctggcctcaaactcctgacttcatgatccacccacctcagcttcccaaggtgctgggattacaggcttgggccatcacacctggcagaaagattatttatttatttatttgagatggagtctccctctgttgctgaggctggggtgcagtggtacgatcttggctcactgcaacctctgcctccagggttcaagtgattctcgtgcctcagtctcccgagtagctgggactacaggtacctgccaccaggcccagctaatttttgtatttttagtagagacagggtttcaccatgttggccaggctagtctcaaactcctgacctcaagtgatctgcttgcctcggcctcccaaagtgctgggattacaggcgtgagccactgcgcctggccagaaagcagatttttaaatttgaggtaaagaaagcttaaacttaaaaagttaatcaaatgcaatggaagcaaatagaccttcaccattctgatttcccatcaccagaatgaccgatacatggggactgttggttcatcaattattttgatttataaagttataatatataagccatataaaaatttccagtgaagaaaaaaatggaaaaaagtaaaatgcttttgactaaatctaaaatgtacctactatgtgctcaaatttgtgtttcattaaatcatagtttgatgatttagaaggcactctaaatcatcatatgtgatcaggcactgtattgtaattgtactgtaggattttctactttaggatcgttgggagtgtttgttaatagagtctgttagaattctaaacaagaatcagaggtgatgtaatctgactttcttaccctgctaaatggcaaccactagtacagctgtcttggtaacagtgggggattcattaggaccttcttcagataccacagatatcaagatctgcagatgctcaagtctctgatataaaatgatatagtattggcataaaacctatgcatatcccccctctatactttaaataatctctagattacttacaatatctgacgctacgtaaacagttgttatatcacattgtttagggaataaggacaagaaaaaaatgtctgtacatgttctatacagacacgatttttttctgagtattttcaatctgcagttggttgaaatatggaacccatggatatggagggctgactgtaattcatcctactaagaggtggagtcttctactgaagaacagaaaagaaatctgtaacagcaaaaaacaaagccaagactatcaaaactaaatgccacagaagttccacattttgtgttgcatttaaaaatacaaagaccggccgggtgcagtggctcacgcctgtaatcctagcactttgggaagccgaggcgggcggacttcctaagctcaagagttcgagaccagcctgggcaacacggtgaaaccccgtctctactaaaatacaaaaaacagccgggtttggcggcgttcgcctgcagtcccagctactcgggaggctgaggcaggagaattgcttgaacccgggaggcagaggttgcagtgagccgagatcgcgccactgcactccagcctgggcgacagagcaagactacgtctccaaacagcaacaacaaaaacacaaaagaccaatacgttagaatcttaactagctttcaaagaaaaaacttactcctgttaacaccaaacagatttgctcccatctataaaacacagtgccactgtgctcaagaggaagatgtcagagacttaggcctaactcggcaagtcttcccagagtagctagtcctctaaaatgatgctttaataggcttaacggaaacaatctcatttacagtgaggcttccaaatggtgaacacggtaaagagcaaatcagcaacattaagtgcacatttgtttgtgggaaggcattaggaaagaggtttttctaagtacagtaattctaaaaatgtgttttcttagggaacaatagtaatatttagactaattgcaaatgttaatatgtgcaatataatttcagtctccatcctacatatacatttttttttaccaccagtactcaaaatgtttatttgtacttctcaattcctatcaatgatttctaatgctggtgtatgaaaagcatgcttgaaattgtttgaaataaaggacttagggacagagtggaatgctggaaatctgtaaaaggactggaaacgctggaatgctggaaatcatggtaggcgcatagccagttattttcgtaggcttctctatctctaattactcagcagaggtggttttattttccttgacagtctgctctaggaagcaatcagccaaccagtttgcaattgtagggtttgtaagaaatgaaaaacactgcacctgcaagtgttttagcatctaccactattcggcttacttacgtaacctccttcccaagaccaagtcagtaggattgtttttaaagcaacctctccatttctaggaggggcacaaaagctagcaaataccccaacccgaatacaagcgaggttgtggagaaagtaatgaaggagtttgtgtgcaaacagcggggaaaggaggttctgttgaattgtaccgtgtgtccgttctcgtgctgtacaggcaatgagtgtagtctgtgcgaaccgggtgtgtgacgtttgcttttcgggtgtacgggtctccgaatgctgcttctgctgtgctcaccaagggagcgcgtgtgcggcgtgtgtctgcgaagcgggcaggttgtgtttagttgtgctgtgccttggaacagtccgtgtgaacagaggagggcttacggttaacagacaaaataccgtaagcgcccttcctagagccaggcacagagacaacggcggcctctggcgccggcacaagggacagcgtggcccggatctcagagcctgggtcactcctcctcccctccagcgacacagcactcccccaacccttccgcccacctccgccgagcctcggctgcactcacctctctccagccgcacgggttcccctagcgccgccatcttctcccttaacctacagacccacaggaaatgacgacagaagggctgaggtgggggggcggggcctaggggaagccggaaaagtgagtaccggctagtatcgcgagatcaggaaggtggccgagtgtgtcgccgcggccatcagggtaagggtacctggacttgcggctttttaggtcggcctggctccgctccttccgcggtgacgaggtcccccggcctcctagggttgggaagagctgctttcctgactctcgttccctgcctcaggcttcccttatcccaatcgcttcgaacccttggctcagcgtagaggagtcaagcctggattctagtcccaccttgcccattagcagctctgtgacctgggactgttcacttaccctctctcagcctcagtttccgcatctgtacaacgagaggtcctatctcttaggtccttacaatttttaaactctgggattcggtggcaattaaatgtgtaatgacatgttgtcagttctcaatttgtgacagcattgctttaaatttaaaaatccacggcttgaatcttccctccaaatctgttaaggggtggaaagtacaaagagcatgaaacatatctgggtgagggagagaacaaggtgctttggtgcaccacaaagtaacaattttataagcagctgattcttataaaatcttaagtaaatgaaatattgtgaagcaaataatattcttaatgcattacagatttttgagccacttctgaaattttcgcgaaccaagaagaattttagtacttggatttgactaacatttatccaagcccttagtctgtactgatactgtggtaggtgtgtttacatccagcatttcaacacttcatgatgggactgttttaataacctgtttgcccctggtccaccctttccattcacctttagtattttcttctccaaatccatcatggatgccaccactatgctcctttttctccccttgaattctgatttcatcatcacaagttctgttcagaaactttcaatggtttctctcctgtttcctatttctaaagccttgcatactctgaccctaactcatccaactaacttcatttctcattaccactaagtgcaaccaccacttcagtccagatagtatagtttcaaccatatttattcctgattccaagtctttttgtttgttttagagacagagtttctctctgttgtccagactggagtgcagtggtgcaatcacagctcaagagagcctcctgtctcagtcttgccagtagcgaggactacaggcaagcaccaccatgcctggcaaatttttaaatttttagtagagatgggggtcttgctatgttgcccaggctggtctcaaactcctgagctcaagcagtcctcctgctttggcctcccgaagtgctgggattacaggcgtgggccactgtgccaggctccaaatcttcatttgtgttgttcttgtgtggaatgcccttcttcatcccttcctagtctccaaactttgtacacactcagttgaacccatttcgtgggtccctgctgaaggcatgccacttctaccaagccttttctccatattattccccttttttgtcctctgatggcctaaatacgttgcagtaacactcaggtgcttatctcttactcgttgtcatttttttttgctgcaaatgtgttcaagaaatgtttattaaacacctaatatataccaggtgccttgataggaataccaggtagagcaagacaaatgcaaacattgcccttatttcttcaaatattttttctttccattctcttgctcctctcctttggtgtgactattggagtcatgtgcatgtacataatatacatgtatattgaactaactggcattgtctcacagctcagtgacgctctgttcatttttttttcaagattttctttatgtttccttttggataattgctatgttttcatattcattaatcttttttcaatatctaatattgaaatcctgtccagttcattcttcatataaaacattgtagttgttgcctctaccagtttgatttgggtgtgggtgtgtgtcttacatcttttatgtcttaacatgctcaacttttctgcagcttcttaaacacatagactacaattataatgacagttttaatatccttgtctactaattctatgatctatgctatttctggcatagtttctattgattgatttttctcttcattacagttcataatttcctgcttcttgcatgcctggaaatttttttttttttaacaagatgctagactttgtaaaatttacttacttgaaaaacaattttgttcttttgggttttgattttttttaggtggaaccaattcagtcatttatgtagggttaattgtatcccactactaagacagtacccttcaaagttccttaccccatacccaaagtgaattatgtggtttttctactttggtaggaacgggaactattcttaggaactgagtttgtggactttttttttgctcttttcctttccctgtctggtaatttatttcttcttctttcttccttctccttcttcttcttctttcttcttcttcttcagatggagtcttgctctgtcacccaggctggaatgcagtgacgcagtctcggctcactgcagcctctgcctcctgggttcaagtgattctcatgcgtcagccacccgagtagctaggtttacaggcacctgccaccgcaccctgctaatttttgtatttttcgtagagatgggatttcaccatgtttggctagctggcctcaaactcttgtcctcaagtgattcacccaccttgatttcccaaagtgctggattacaggcgtgagccgccacacccgggtggatgtttaacacatgtaatcatcataaaatttcagaatcctaggaatagatagaagatcctagaagtttccagagaggataaaaaattatattctaaggattggaaatcagaacaagattgtacttctcctcagcagcactggaagctaagacacagagagcaactaaatttttagaaaaaattatttgcaaactagaattctatatccaactgtattaggtttctagggctgccataacaagatacaacaaactgggtgacttaaaacaatagatagtcactgtctcacacttctggaggcgagaaatcagaagccaagatgtcatgtgctctctgaaagtgtagaggattccttccttgtctcttcctagctttctggtagtttgctggcaggctttggtgttccttggtctgcaactgtattacttcaatctctgttgtcattatcacatggcgtcttcccttgtgttatctgttgtcagctggaaatcatcttacaagaacttcctatttcggtgtgaccttaccctaaattagttgcatcatcagtgacctcatttccatataaagtcacattttggggttctgggagttagaactttaattttttttttgaagggaagagatacagttcaccccgtaacaccaaccagagtatcaatcaggtgtgaaggaataatgaaaaatattttacacatgtaagttctaaaaattgttaaccttccatacatactttctcaagagctactagaaaatgtgctccatcaatagtaggaagtgagccaagccaagtacagtagctcatacctgtagttcaaacaactcagaaggctgaggtgggagaatcacttgagcccaggagtttgaggctgcagtgagctatgattgtgccactgcactccagcctgggtgacagagtgagatcccatctttaagaaaaaaagttagctggccagggctggtggctcatgcctgtaatcccagcacttcgggaggctgagacatgtttatcacttgaggtcaggagtttgaacccagcctggccaacattgcgaaactccatctctactaaaaatacaaaaattagccaggggtggtaatcccagcccctcgggaggctgaggcaggagaatcacttgaacccgggaggtgcagtgagccaagattgcgccactgcactccagcctgggcaacagtgcaagaatctgtctcaaaaaaaaaaaaaaaaaaagttagccagtaaaggtatgtgtaatccaagaaaaagaggatccaatatagaggagattaaggtgatttcaaaatgattagtgtatcagggtgcctcacagaaacagaaccaatagaatatatttagatatatagaaaggatttattatgatggattggctcaggagactacagaagccaagaaatcccataatttgctgtcttcaagtgggagacccagaaaagatgctttagttccagtccaagcatgaagaaccaaggcctgagaaccagaagagcctctggtgtaagtactagtctgagtccgaaggcctgagaactgagaacactggagtccaagggcaggagaaagatatctgagctcaaacagaaagggcaaatatgccctccctctgtctttttgctctatttgggccctcagtggattggatgatgtctgttcacattagtgagagtgatctttactcagtttgctgattaaaatgctaatctcttctagaaacttcctgacacactcagaaatattgttttaccagctatctgagcatcacttagcccagtcaaattgacacataaaattaatccaccacaattgtgaagggaagcctagggtagcagacatgcagctggcaaagagagcaatccattcacactgaagcagggcagaagtggaggtgaggtgttgccaagaaaaaaatgaaatatgtagttcaccagtgtgggtgagcatactgataacacatttatgcattttagtggagagtttgggaataaattggtgataggcacatagaaaactaagcaaacgggaggaaataaagcaattattaactccaaaaaaacctgaaaagccatgtaataaaggaaatgtttatgagtataaggtggatcagctgcatacaacatattcagcaacttttaatttttttgagtataaaccctgtaatgctgtttgcatttttaaagacattttaataaaaatgaaaattaataaataggaatcacaatactaaagataatatttgatatattttattttgaaatatttaatttgtattggcctcatcttttcaatttgaaatctttgctcttgggaaggggaataagaaaacttaattataagcacaatttgctgaaaaagcacagacttactaggtttaaagtagtgtttaatgattagacaattttcatttaatagatttgtacatctgctttgtttggtatttgaatctcattgtgctgtagtctatggatttgctacccttgatcagatactcacccttggttcaatcaattctatctggtacagtggaagtaatggttcacccaggtccctgataagtctgggggtagaatatcttcccttagaaaaggctagagtacagcaggcaatgtatttggcctgtctaatatagtacattacatatacatttgggaaaaatgttgcaaattccataagagtagcagcctgacattatgggaagagcacaggactaagtgtcaggagctctggttactaatcatagatgagccaccttgtgatagtgtgatcttgacaatgtcacattctcactctggacctgtttccttatttggcacgaccactgaataagatctgtctgagccagctgcagtgacatccacctgtatgtagtcccagttcttggaagactgaggcaggaggatggaggccgggagtttgaggctgtatgattgcgcctgtaaatagccacttttcttcagcctgagcatcacagcaacaccccaaatctttaaaaaaaatctgtcagcacattaaaaattactttactctatgtcaataaagtaattaatataaatacagattcccttgaacttcatggacttatcaaatcagaatccttaggagaaggctctgggaatctatattttaaaaaatccctagtgattctgacacagctagcctgacacagggacctgtgttcaggatttaaaagattatttctagggcctttttctactaaaattcagtttccctataaaactgcagagaaaaattattgagaaaatgattttcattataaaagaatatgtagctcttgcataaagggcagcatttctagctaattttaaaatttattttatattattttaggcatagataaggaagaaaaaagttttggaaactacttctgagagggaaaaatatgcctgaaattaaccaacagccagcttgtacttaacatacaaaataaacaaaagaatcaactattgtgtaaggagagaaccccgaaatgttcctcgttaatcgaaattcaagagtattagcgtcgggaaagatctagagagtcaactccctcatattaaagaagagaagatggattgctgtcctacattcaaaggaggccattaggagcatgaaccaagggaagctggttttccttctatgcctctgccaggttattaaatcaccaggcctcctaatcaagaattgctcttcgtgtggaagaactcctcttcacctgttgcttcctcatattatttcctgcctcagagatgtagaggaactgtaaaattagaataggatgtttgggtctagacaaatcccagtgaaagctaaattatggaaatttagtctttgtataacaaatgaaaaccctaagtaggctgccaaggtacaaaagctttcttaacccgagacattgcaaatacaacgtactaagtgaaaaaaggagtgggtggggaacagtgggagtagaaggctgtctaaagggaagctaggaaaatggaaagtaatatggagaagcaacatgctccaagtggagtgttttactatttcattgcctgttgaactgtacacaaataggcactactacataaaatagctatttgaaacagttatgccattgcagggtagaacattactctcaagtaaaggcttctaactgtacaattaaagtctcaatcttctttttttaacagaatttctctgatgtactcagcaaagtaaaattttgaatagattattttatttgaagtgaatgatattgtcaaatgttaaagagtctgcattttaaaataatttaaacaatatataaaaacacttggcctaattaagtaatcataacagtatggaaaaatctcttcaagagcacctttgaagggaaattttatcacagatctcagatcagaacatagaaacccatctgtgagttccagagatctaacataaaccctacttttccttgtaggatgagttgcagattctattaaagtgtaagggttgacttttttaatgtcacttgtttcatcatcactctgtagtacatgtaaaggcacagattgatgtatttttctggcatcttcctgacgcacccttgccctatataaatcggtttgccaggatcttgttgcttaaattagcgattgcaaactcttggtcctgccaacacagccgattgtgccaaggttctcagcatctactggcacatgaactgttgccttttctttggctttctgcatgtacctggggccatcatccttccttcacaaagcagcagtctggcttagttgtccctgagaaagacttcaggattggttggactcaactctggccctcttcaggttgtgcatcctgcacaatgtattttcagccacacaatgtattgttcaggatttgtcgtgcacatacttgcagattggcagagccaactgccagagatgagaaccttttaagttgttgtcaaacgtcataaaatgtgttccgtgattaattttgtgggcacagattggtttttgcacagagtccaaaatttaggatatgtcacagtgactaaatggcaccggcatgctgaatgaatttggaatttgttttgtcaagtgtgggagcaggcacacagatgggctttgatccagtggtgctgcttggaattctcattatagcaatgatgtcacttgtcacgtggagtaagtgataatgctgccaaattgtggaaaaagcaaggcaaataggaaagtacacagaccaagagaaaggacttaggtagcacagtaagctttcactatcagatgaatggacataaacattgcttttgggctgccaaaaatatgcatagtaaaaatacaggcagaaaggaaaacttccaactgaaagggcccttaaagtagggcccctgtaatccaagaagtcttcacttcttagagaaaatcaagtaaagcaaacatgtccttgatttttatattaggctatgaaagaaatttctgagctgcaatcaagagtctttctgcaatatctaaccaaaccaaagccaaagtattttgctttataaaaaaaacctttgtctatgaagaagatcagcagtcatgctgggaaattgaaaaaaacaaaaaccttatagtggcaaagaagtacagtatactctcaccaagcatgcacatcagaattctctgtagggctttaaaaatatattcttgatgcagctacagcagtgcttagagggaaatttatagctataagtgcctatattaaaaaaaagaaaaatatcaaattaacaacctaaacttctatcttaagacacttaaagcaaaacaaactaaactcaaactaagtagcagaaaggaaacaacaaaagttagggcagaactagaataaaataacgatacagaataggaaaacatagaatataaataaaaacaattgagaaagatgatgaaaccaaaatctggttccttgaaaagatcaacaaaattgacaatgctttaactagactgaccaggaaaaaaagaggaattactaaaatcaggaatgaaacgggacatttctactaaccttacaagaataaaaaagaatattaggaaatactataaaaatctctctctcttgccacacacgcagtatatactatatataactgaatgtatgtcatgtaacttatctaatttgttgaaaaatatatttgtcacacaattcacgtcagagggtcaccatgtaaattttgattcaaaaactcgagtatggcatgaacatttgtattttctgaaaatataaaggtttttgtgagtgacatgtactttttgttgagaaccattgatctaccacatggaaggcataaaaattgtggaattacaattaaatatgcatcaattagaattaggtatagctgcatataaacacaaaaatccaggctgggcatgttggctcatgcctataatcccaactttggcatgatctcagctcactgcaacctccgcctcccgggttcaagcaattctcctgcctcagcctccccattagctggcattacaggcgcctgccacgacgctcagctaattttttgtgtttttagtagagattggatttcatcatgttgaccaggctggtctcgaactcctgacctcaagtgacccacccaccttgaccttccagagtgctgggattacaggtgtgagccaccgcgcccagctattcccagtattctgggaggctaaggcaggaggatcacttgaggccaggagtttgagatcagcttgggcaacatagcaagaccctgtctctacaaaaataaaaaataaaaaaaattagctagtcataatagtgtgtgcttgtagtcctaactacttaggaggctggggcgggaagattgctcaggcccagaagttcaaggttgtagtgtaccactacactccagcttcggtggcagagcaagaccctgttttggaaaacaaacaaaaaactattttgaaaaaaaaaaaaaaactcacaaaagtccaaaataatagtgcatttaaagtgaatgaaagaaatccatagataggtaacttggtgcaagtatgacagccccatggtatcaccaggatcccagcttttttcattttgcatcaccatcctaggacatggcttccatagtcaagttcactcataatctgagatggctgcaggaatttcagtcattacatgtgagttgcatgccagaaaaaaagaataaggaattgcagaagggtaaaaatcaccctttccagttgaataagcatctttaaagcacccttttcagatgtccaacataatattttgacctatatcttcttagccagactcagttacatgtctccatcttactgcaaaagaactaggaagtaaaatcttttattttgagtgacaaagagcccagctacaaaatctcaactctgtccccaaggaagaaaggtaaaataaatatggggataagccttcagcaagctttgccatactacaccacaacttctggaaattacctttaaacctagttcctgcagcattcccggtcaatagatttatttcccttcattggaaagttttcaacttaactcaaaaacgtttactagcaggtgctacaggagagaggagaaatgtcagatgtgttcatgtccttgaggaactttcaggcaatttcagcaaacggaaactacaccaatgagacagtaggaatgttatctacctgtatgtactgcaatgctatgttttatggtttggaccactactttatattttaaacctaaaaacccattgtctgcaaactgactcaaactaaattgaaataagccacattactgttttaacccaaactgattctgaaagctagtatttactcaactacaaaccattcagtagtgtgaagattaaacaaacaagcaaacaaaaaaaccctctccagatcctccagatccatgtttccccttccttcctttcctgtctgtctctctctttctttctttctttctttccttctttctttctttctttcttttctttctttccttccttccttcctttctttctttctttttctctttccttctttcattctctttctttccttcttccttccttctttccttctctttctttccttcttccttccttccttctttccttctctttctttccttcttccttccttccttctttccttctttctttcttcctttcttcctttctcgcccaggctgaagtgcagtggtccaatcttggctcactgcaacctctgccttgattctcctgcctcagcctcccgagtagctaggattacaggcacctgtgaccatgccagggtaatttattttttatttttagtagagacgggatatcaccttgttggctaggctggtctcaagctcctgatctcaagtgatttgcctgcctcagcctcccaaaatgctaggattacaggcatgaaccaccattccctgttcttagtgtttcttataacttcccagatatgaacaaaaccttgcaaaagagcatttcaataatctttagcttctcgatcttccaactgatgtggccatcaaatggctagtcagaagacaaatagatgaagacaatagctttattaaagtcaattcaaattatgacctactatggtaagacactgtgctggggtctagaggcaccaggacttcacccttctctcaacagctcacaaacccagtggaaagggtcagacatataagcaaccaacagaaacaaaggagatggcattaaatattattctgctcttgttgctttagttgttgctgcttattgttggtcttgttgttgctttagttataggggtttttaacagagttgcaaagtgttgtggagtaatgagtggggagaaatgatttctcactggaggtaaccagaaaacagattagagagcagtgattctcaaccaggggcaattttcaaacccataggacatttggcaatatttggagatatttttaatggttatgacaatggatagatggatagtcagggtgagggttggtactggcacgtagtgagtagaggtcagagatgctgctaagcatttttcaatgcataagacaactccctacaacaaagacttactcagcataaaatgtcagtagtacctaggttgagaaaccctgcttgaataagatggatacgttgtacaagaaggatcagaattttcacaagtggatgaatggggacaagaatcccagagagagtactaaatgagcaaagccccattggaaaaaaaatataggccctgttcaggaagtaggagggagggcttcagtggggtataggttacacaacggaacctgaggaagctgtaaaaggaaagggggcttagcatttagattgaggctgagtgcaagctgctaaagtttggattttattcttttggccagagtgagctattgaaggatttaaaaaatggaagcaataggattaaaagtgtgttttagaaataaaatcagagggaaaagctttgattctcatagcagattgtaagaaaattcctttaagggagtcacccttattttgggtgttgtctgatgtttattaacctctggttgttggaaaatagcaaaactgcagagaagggagaaattctgcatatttgggcctgggttggatgggcagtgaggggtgaggaaggccaagggaatgagagagtggtgcaatgctgatgtttgtgctgtgagacccttcttcatggcttccagagctttggtaatctttacaaaaattataatatgcttgtgcttggatttcttgtgcaaaatgactatatttgggttgattgtgaagattgggagaggaggttggtgacaatggtgcaatggtagcatagaagtaataatttggatgcttctataatgggcagtttcttctcctacttcttcctttcagatcctgtagtcctgtcccacagaactgctcatgcttctccagtacgccagtctgcatcatacttacatgctcttctttctgcttggcacgctttccttttctaacaaacttctgctcatccttcaagacccacttcaaatgttccattctctgctctgccctgtatacaaaatatcaatattgtattgtgtttgctaaagtgtttattttccccaaccagagagtgagccccttcacggctaagaatggcattgtaatcatcactgactctccagcaggtagcaaagcatattaccgaagctccttgatcatttgctgaatgaaccatgggtaataaaatcagtgagtggcagaaagattgtggctctgggcctacatagcctttgcctggttgctgttagaactacattttcttctctttattaattttatattttaaacttcatccccaagcttaaacatttccttccaatagatgatattctatcaggaagagaaaaaaaaaaaaacccaaagtacaactttaatccttgagtgaatgggctaaaatcaggtttcaatatgctttttagaatacttccatgtaattaatttaacattgacctgcttattaagagtccattattaaggaaacaattgtaaaagtcattaagggcatttccacagatcttagctactgactcatcttgctagttctcaataaacgtgacctgaaaatctctcattcgcagtatcaggtaaaatgttatttttctaaccattaggaaacatttactcttgggctgatttttatgtgtttttattgttgttgttaatgtgaagaaagtcctatacaggaacagctgcgcatatgggtaaatgcctgggaatggtttaaagatgccttttcaaaacatcttccccacactggtattatgcaatgcctctgtctcaacaattaataagtatttccttttgagttaaaccatgaagtatatagtcacactagctcattttgagatagggcaagactcttctggcatcagaaacccatatttggaatgtggatattttgtcttttctgtttgttatttcatcttatgttttccttcaggatttagtaaaattctttatgaaagtataagctggcttaggttaggggttttcaactctgctagggggcaagtttaatgagggagccattcatcctggatctgaggaagtcgtaaagatgacaccaaagtttcaaagggccccagaaccctggcaaggttctggcatgaccctcatccctcgtcccccaacactgacagcctctccaccacaatctgcctaagagacaatccaggacaatctcgccactcccttcatcccatataccaaactataaggtcattcctaatagtctagatctacatcctgtttgtttattccctattctgaccccattgcccatttcccacttccaccccttttctgtgctctgtggcccattatcggctaaagccctcatattctcaaccttttctcttagtgtctcctacacattatttttttaactgaaacctggacctctgagtcctgctttcttgtagcctggttgagtggtgcttattttcttttccacacccctttgagttaaggcaggaagcctgtaattattccaggttcctttaggatagagtatgactcttgtgagaccagaaacatatagcctatatttggaatgtgaatttgaatagaattccggacttagagatggggagatgtctccctggtttttattgctcctattagaccaagttctcttctcccttggtgtgaaatttagacatcattaccagctaccctttcttattgcagttatctgctgactgggttactttccacgttctttgaagatgtaaactcccagcttatccgcacttgtttgtgacaacaatttttctgtcacaattcctagatgatcatttcaatactctctggcatctgagtcccttgacctcttctcctataatgatttcattctcttccaacctcagccactcatgctcatggaatgagccattcatagcctcccctcaactttgtccttatcaataactcctcatcttccataatctccatctcccatccaagaactaaccaggtccgaccatgcttagcttctgagctcagacaagatcaagcatgttcagggtggtatagccatagatcaaaatctcaatctcaagcattctaccctaggcccaccacctcatatctttccagctcactgtccctcacattctgacttaaaaatccgttgacctaacaatgaatttgtcctaccatcttttcactgtcctttacatcctgtgtatccttacctccttatccatcctagatcttatagtctatcataatcatcactcactttatacaactgtaactccctggagcctctttcatgttttttttccttctttggaaaacccccaatcctagttatttgcagcccttttcttactctgtacctgttttctggttgctgaacttggctggaggaaagtacccaatctactgcttggtatcactttaaactcatgagcccccaaatttaagtgggcccagcaattctaattcattcaaagagtttgtgaactcttgcttcacaaacatgatctcaaaccttctgctctctcctcaaacttttgcgacttcttggttctttattctcagctgatggccttgatttcttttacacggcgaaaatggaaacaatcagaggagaccttccacatgtggttcccatcacttcttccaaacctgcttgcatcttcgcctgtgtcccctcatccattctgtcctctgaggaactgtccatgggtctgtccaaggcacagccctcctgttctacactaggtcccaggatctcacatctactcaaggagatcactctagcaattttactctagccattttggagaggctctctcttcctgtttgtttttttttttaatttttttaatttttatttatttatttatttattttagatggaatcttgctctgtcacccaggctggagtgcagtggcatgatcgtggctcactgcaacctccacctcccgggttcaagaggttttcctgccttagcctcccgagtagctgagattacaggtgtgcaccaccactcctggctaatttttgtatttttagtagagacggggtttcaccatgttggccaggctggtctcaaactcctgacctcaaatgatccacgtgcctcggcctcccaaaatgctgggattacaggcatacgtgatgacgcccagccaaggctctctcttcttcctcctgatcaatttatgtccatcagtatataaatatgctttatttctatattaaaatactttcccttgatctcaagcttccctgcagctacctttgcatttttcttatcttctttataacaaaacttcttcaaagtattgttcatacttgtagtatccatttctgctctcttactctctcttcaataactctaagtagacttttatctacaccactccaccaaaacaaccccgtcagcatctccagtgacttccacgttgtcaaagcgaattgtcagttttcagtccttatctcactcgaaacaattgatcactgcctccttgatacattttcttcatttgatttcttggatatcatcctttcaagtctgagcacttacagtgtggccatctcaaatagagatgtctgagtcttctatcaaaatcttcgctgaccttattgggtactttctcaatctttctaatggtttctcttacttggcttcttaattttggaggaccctgagaattctatccttagacctgttctttgtctacactcactcactagatgacctcatttggtctaataactacatactatctaataactatatactatcagtgctatcccatacaaatataatgcaagccacattgtagataggtgagtcacagatataattttgaattttctaatggccacattaaaaaatgaaaaggaaacaggttagattaatttggtaacatattttattcagcccaacatattaaaaaattaacatttcaacatgtaatcaatgtaaaatgagtaatgagatgtttttcattttttaaaaatattatttgaatttcagtgtgcattggcatttatagcacatctcaatttgaactagccacgttttaagtgctcagtagctgcatgtggctagtggctactatattagatagcacagacctatatgctggacattggcttttactgagtgagatagccaatggaaaggttttttatatacaaagttttaaatttaaaaatatatatacagatagggtcttactatgttgaccaggctggtctcaaactcctggcctcatgtgatcctcccatctcagcttcccaaagtgctgggatttacaggcatgagccactgtgcccagcccaaatggaaagtgttggggagggaaatgacatgactactctttttttttttttttttttgagatggagtttcacttttgttgcccaggctggagtgcaatggcacgatctcggctcactgcaacctctgcctcctgggttcaagcgattcttctgcccagcctcccaagtagctgggattacaggcgtgtgccaccatgcctggctaattttgtatttttttttttttttagtaaagacggggtttcaccatgttgggcaggctggtcttgaactcctgacctcaagcgagtcacccgcctctgcctcccagaattctggcattacaggcatgagccagcatgcccagccatactactcatttttaaaaggccatcctggctgctccgttgaaaataaacaatgtgggagtaagggggcagcagagagaccagctagaaggttagtataggtcaaagatgaaggagagagtgggatagactggaagaaaagtggtatgttgaaggtagaacatgttgaagaataggatttccagatgaattgtacagaaagaaagcagtccagggtgatccctggatttttaatctgaaccactggaggaattggaagaatagagttgcctttaggtgagatggggaggactgagatcaataaattttggagaagcagagatcagtagtttgaattttggatttgttaagtttgagttttccattaaacgaacagacgaaaaccacaaacaacaacaaaaaaatgaagatagcttctgatagcaacatgtgtcatgaagaaaagaaaatagccatagagtgactgaggaggagtttcttagacaagcttgtcagtgaaagcgtctctgaagaaggggcatttgaactgagtcctgaatgatgaaatgaggccagccaaacaaaaatctggaagaaaatcatttttagttagagggtactacaaagataaaagcttggaggcaggaatatctgagagacagaaaagcggccaatgtgtctgaagtgggtaagatggagaagcagatagggaccagtcatacagtgccttgtcagtcacagtgaaggagtttggatgctattttatgcactgaaggaagcctttgggaggttttaagctagacgtagcatgatctgatttatgtattacaaagaaaactctggctcctggatggcgcatggatttgtattatactaattattattgctattattattacaggagacaaaagtagaagcaaggagagcaattagaagcttttacactaactgggcaatacattatggttctttccactacacagctcttcttctcttgcctctaagtcttttcttgatttcaacgaattcctggagtgagagaatgtgtattcttagtctctgtgccctctgacatgcccagcactatgtcctgcccacagcagaaggctcagtacttatttttgagtgaattatatggctcttctcatcaaggctgaggagcacatttttaaaaaatatatatttgtattttttgtacatagcatattgtctgtcccatagttaagactcaatgaatgtctgttggagtggggcaagacctcacttcagataaccagtttactgagagagatccttggataggcagaggcagcaaagagggtttgggccttgctagcatggagggtaggaggaaggcagggaaggtggagcatgttgagagaagagaggtggataaagtcacccagctctgagcaggccaagggtagatttggtctatattttaatttaaggctggcctggtttcattgatggtgatatgatccctatgtgtgggaataggtgaaatggtttgatcacaatgggaccataatccattacccaaagccttcattaaggagataattctgttcagcctcacacatagccaggcctacaggaatttgccatccagcaccaatactgatgctacaagtcccagcaaacacaggatggcaggccaaattcaagctttctggcactcctcctcttctggctgagcccgatgtcctcaggcctaatctcaggctggcagagagttaagtgctgggctgagtctgtgctttgctgcatgtgctggacttgcatttgattctgtccaaaagaggtctgtggaccagagggatgacatttggcaccaagaaagtaacccaggtgtctgtctctttttcagtcccaaagccttattcttttccctcaagtctatgcaatcgtttggaatccatcactcatcacctagaggtttcagtgcctttagattagggttctgcacccatagctgatgatccactggactaccacacttggcacctgaacagagccaacaggactggttacaaattcgttgttaattactgtgtgtaattacactagacccaaggttggagggagacaccctactctgttgttgtcttatatacgaattctgtataattttttaaaagcccaccatttttactttctaattaggatatggggatttggggcagcaacctttgttatttaatcatgctttttctggggaggggaggagaggaaaatattttcctttttctatcaacaattgctctcttttccgcattaagagggtggaaacttggttcctccctcatcccctttaggcaaagagtccatggctcagattcataaaggttgttgattttgactttgggttgccctactctgtttttccccacctttcatgctaactaacacaatacataagtcttcctagccagcactccctaagggtggggtagaaacacagcccattaaaaaaattttttttaaagctttgagtaatctcctttttatattcacccaaatgaaccaggttggtggcatattctcctttgtttttacatctgagacgtacttaaagtttaaatagtgccagaatgaatcacattgcttgtgttcttatacccagctgcaaatcatgccaggctcaagcccaggaacacaagattgcatgcacgcagagagggtcactgctgtcttatctactcctgctctgctaaaaaattgcatttatttatttatttgtttttgagatggagtcttgctctgttgcccaggctggagtggcagtggcatgatttcagctcactgcaacctctgcctcctgggttcaagcaattctcctgcctcagtctcccaagtagctgggactacagggggcctgccaccatgcctggctaatttttttgtatttttagtaaagacgggttttcaccatgttggccgggctggtctggaactcctgacctcaagtgatccacctgccccggcctcccaaagtgctgggattacaggcgtgagccaccacagctgaccagaaaattgcatttattatatactgccccgtccccatcttggcattctgatatcattgttgcccatcctttccttcccattgagagagtcaacatttcccctttcccatcctattctcattcctacttctagctttactatctactgtataacctgctgagcctcagtttcctcaggagtaaaatggagataataagaaacacctgccttgccagtgtcacacagctattgaggatcaaatgagataatgggataggaaagtgctttatttctacaaatgcaagctattgtcagtatcatttacttaactattcttcgttagctagctacgtagtctagcttaccttgtcgtgttccaaatgtggaaggcttgctgtttctggtaagttgaggaccatttcaaagcctcaagaaaatgattagaaatgaaccaatgtgagaacattttctttgttgggtagttcatccgattattatgtatgttgtttgtcttcttttaatttggatataggttgccttcagctgccagtactgtgaaataagagacgatattataaatcctttggagattaagcatttccatcctaatagctgctgctcaaaatttgatttccccttgattttcaataaaaggaggataacagaatgttattcattctaattataaagcaacgggaattctaggcattactttacaaatagctgctttcatgtcagaataatgagtgttgagaggaagagctctgagccctttactatattctttgttttcattatttttgtacctgtaaggaagatggacacattgagggacagagactccacagaagttgtctgagttgtgacagcttctcatcttctttttcatttccgcatttaacatattttctacaggctttgtaaagaaaataactcagtctatgtttacaattttcacactggctttaacttattttaacttattttatttttggttggtgttcaccctgggtttctgagggttttaagctgtctgcaaaaagctgctatctttgtctccaaagaatggttaagccacttttgtagaatcagaatgttaggtgaagcccatctttacataggaaaaagcaaaaggaactaatattaattgaatgttcactacatgctgggtctcatgcgaggctctttacacatatcattttacataatcctcatagcagctctatattatataatatgatctacatttttttcacaagtaaaaaaatatttaaagggagcaagttacatcatcagagcttaaagatacctgtgctatacccctataaaaaatctaattcactatgtgttttggtctatggcatttacatttttgaaacattttatctttcctaaattgtagttacttccccctaccttgacagatagatattgtattgtaaaaatacaatagaacaagtatcttttaaaaaatatgaaaacaaaacatttctagtcaattgttgaacttctttcaaagttctgggttaatatcaggtaggccttttactaatgcattttatttccttctgtctgccaccagctggagctactgtataaaagccaaccattttgagttcaaaatataactctgcaatatgaaggtagactacttttgctcctaaacaatttgagaataaattgcaaggaattaaagattgagaaatgcaatgtcatagatggttaagtaattgctattgatcacttactagttatgcaatttgggcaaattattttgactgtgactcccagtttagttagttatgaaatggttataactaccaatcttgtggggatcactgtagggaaaattaaatgttaagaaattagtaaggagcctaccacatagtatgtactccacatgtgttcattagtatcattggcagttattattattcattttgttatcagtatcacagccccagggatgctcaattcattgtaattacaattcatattattactcattatcgtgtgcctggcaaatggcaagtgccacttgacctcccattgctcagtgtgtgatttttgggtttcagtgtggtggactgtaggatggcacccacacaaagaggcattctgcttggatgtcaaaggaaaggaacctgtgagaggcatttttgaggttgatcgggtcattttgggtcagagcagtatttcccaatatatgttctgtaggattcttgtctcaatggatcaaataagaatgagaaatataccatatatatcccttttccacttcacggagccacagtgcatgtaagtatatttaaggctctgaaaaatactgtgagaatcaacccttcttctatttatacctaatcataagtgatttctccattttctccatgaaattttaaaaagttgatatgtaatatataaatttagatgaatataggtattcatgatttcatattatagaaaaatatgtttagaaatatggcttttaactcaaattttatgtcttttttccacttaaattttatgagaaagacatcagtgttttcctccttattagcaccacctttggagtcatgtaattttctggagcacttactggctcactggtttgagtcacagcggtttttaaatgtgtatgatttgccacagtagattttatttctagttataagtatccgtttgtataatacctgaattaaaaaattcatcctagtgtatttttataattgttataataaatgatctttaaaaggttttttttttaaaaaaaaaagcaagtaaaattgtgaggttgtaatttcagaaataattgtgaattttagttaaatttactggccttccatttaatactttttgtcaggtaacctctactaatttgacaccaaaactagcatttatttggttaatatgttcgccctaaataatacgtggttgataaagcaattataagagagcccagtaatacaggagctgctataagaactggaatatatgacaattctttcttttctgagggataatttgaggaaaaaccttgtctcatatctatatttacataacccagtgttgtttgtgtgtgaatgtgtatatgtgtgctgaaatacctgtttacgtgctagaaacaccctcgtggtaatggtggcatagtgggtaattgttttcatcaggatttttcttgagaataggctgctagcaagtgctgtatgtgacagaaactttggccaaaaatctgtatttataactatatcaatttcttgtattttcttgttcattttaacttgcttttccctcagaatttaatcaagtcttcaaaaaaaattatggcagagtcactcccatccctgagacacttggtcaggagctttacagaaggttagatactccattaaggttagaatggtggtggattggtggttagaccacagaagaacccccaggggaaggtaaaggcctggggataaagacatggccctttttattctgtcatccttctctccttgtaatctcagcactgatgaaccattagaatctccatggaaggttttaaaaaaacacatgctgtcacctgagaacatttaagtcagaatgtctgggagtggaccccaagcattagtgtctctcaaagtcttcttcaggcttaaaagggttaaaccttctagacaatcatcagtccttttgtgtcttcctcctaaaaatttgaacagtagtgacctattagaagtcaagagttggatctaaactgagaaagcatctgtgcattgtgctctatttcttcgtgtagcttctccccactcccaagtcactcctaatatttccattatagatttagacacagaaaacccagatgaagaagctgcatgctcccgatgggatgggatgatattggtaatgggaagtctcatttctgaattgaatttgagtgctgggaaagcatattggctaatgtttcagtcctttggttgaatttgtgtctttgacaacaaatgcttgtggttgaagttatacaattctcatctctttccatttcccctcactggggcaggcttcctctgtgtatttttttcctctgatgggaaagagcatctgcagctacttttcttctcagccaatagactaccttcttgtgagttataaagaggataatatgtgaatcagaagccaagactagaacccttctcctatggacatggtctattcaggaggcaattttagagataaaaatcaggaacaccagttcaataataataataataccttagaagttaacataccttttaaaacactttcatatttgtcccttttctcttgaacattccaaagagattgacaggacaaataccaatcgcctcattttaagattaagaaacgcagatgctgtgaagataactcagttccccatgataacatggacagggacagaggtcggactaataactggttcttcagtaattactcaccttgagcagctctgaaggtcatagagtagaccagtgagtggttcccaaacttggctgcttactagaatggcatgggaggattataaaataacacaattatgccaacttgcctctggggctctaattcaatacacctgggatggggctcagggaatctgtcatttaaaataatttcttcatagttgttctcaattttgactaaatattagaattacctggcagggaggggctttagaaaatcccactggagaatcacttgagcccaggaggttgaggctgcagtgagctgtgatcatgctgctgcacttcagcctgggtgacagagtgagactctgtttaaaaaacaaacaacagcaacaacaaaaaacatttcccagattgtattccagacaaattaagttagaatttctagtgctgggacccaggcatcagagggtttgtaagtatctccaggtgattccaatgtggaactaaggttgagaaacactgctatagactagagctttacaaactctgtttttcagaatttcagcacagcaagaaggaaaagacaagtgtagaattgtcacatgtctggagtaagaagaccaggattcaagtcctggctctgcctcttgggaatgtcacttcatctctctgagcctcagttttttatttcataaaatgaggaaaatgagcagtacatacctctcagggaggccatgagggttagatgggatattgcaggtggaataaccaagcaccagctattcctgctgttttccaaagaactccattaagattgtgtgtgtgtgtgtgtgtgcgtgtgtgtgtgtttccccctagatgttccctttgtgttcaaagtttccaccctcaaccttacacagagttagacttgtagggcatgaaacagagctccaaaagtttccactaatgaaataaggtttggaaattaaaggaatgtcgttaaggcttctttttgctgttgctattggcatgttcagccctctgaaccttggagttatgaatctgccagtttgctaaatgcatactcagaagggcaatttcgttttcagaatacaaggacactttagctattactactcaccctccccattgctcctttctagctctttgagctcccctgaatgtgcccccaagcacctcttgtttattcccattcagcaaattaaggaaggttctagtatgcgtttcttatgcagcaaatgctgagttcactggaactcaggcctgctggagaacaaattaacccatactataaacacccactctcttgcctgacaatttgcactggttagaacagaaccttctaatattaggaatggtggtgtgaggatcatttcataaccacaaacacagcaaaagcaatcatgaaattatggatgactcattgtcaaaggaacacttggatcattttgagcaaccccctaggttgatcaaatgaggaaacttctgcaccaaactcacaccgtgccattagtcttctctgtaattgattgttattgccagatttgtctcaaccacatcagacctatttttaaacctctcataattgccttctcactaagtaaaatattgttttttgagcacctttcttttatttcatatgtgtctatttgtttctttcttaaactggacagtgcattgagaacagagattatttcttatttatcctaaataaaatagtacctggtgcacagtaggttctagtacataaatgttaaatgtaccataaattgtacattctttcccaatgaaagaggttgtttctaacaagctaaggaaactaagatttgctttgtataccactttctctagggttccatgaacaaataaattttgccatgatatatacacatatatattttagagaaagaaaggagcggggaggaaaagggaatggagaggaggggaagggaggagagaggaacaaaaggaagggtgagagagagataatactaagttcttgatactatttaaggtgttgggatacaaaaatgaacaaaactgcccaaaatacttgctctcagagtttccactcttgcgtgtttatgtgtgtgtgtgtgtgtgtgcatgcatgtaatgaggaaacagacaaaaaacaaaaaagtaagtacaatataatagtgttagatcatgatcaatgctgtagagaaaaataagttagagtaagggaatagagagtgctggatggagtgggctattggattttaaaatggagtagacagggaaggcctcgctgtgaagatgaaacttgagcaaagacttggaggtgaggctgagagtcttgaagctatttgggtgaagaatattccaggtgggaggaataggaagtgtaaagtctctgaggtgagacagaaattcaggagtttccaggatgacgcaggcagttggcctggagtggagcagtgcaggttagagtgtaggataagagatcacgggagtggctggacagctgagtggcagtgttgggagagctttggagggacctgtcattgtaaagaccagcctttactctgactgagatgggaaaccattgaagaatttgatttgatttaaggttgaaagggttatttttgctgccaggataaaaatggtgggtgggaaggtaaagagggaaacaagaaaatcagttaggaaattatggtaataagacaggtgtctcagaccatgatgatagaagaggaagtagtgtatgttaaagaatctgaatagatgttgaagatagaactaatagaattaaccctcagattgatcatgaatcatgggaaagagtgaaaaattatcccaagttgtttgatctgaatagctcagtggatggatggagttgccagtaattgagaaagggattcctaaagaagaggttttgaggtaaaggggaagatgatctatctgtctctttctctttctctagctatttatctacttatctatctatgtatctgtctagctgtctacatacttacctgtctgtgtctatctatctatctatctatctatctaatcagatgttttatatatgaggtattaaaactcaagatgttaggtatctggctgaagatctcatagctaacatgggtgatgctgagtttgaagtgaagtattcctgtatagacttcaaaatccctagtttccctaccctaccagacctttttcatatatcattgcttttaatcttcacaacagcttttatccacactttaaaattataaaacctaaagtttagagagtttacacaactggcctaagtcatgcagctagtgagacagcagagattcaaacttggtctctgactccaaaattcatattctttttttttcacttttattttaggttcaggggtacatgtgcaggtttgttatataggtaaattgcatgtcacagggatttggcgtgcagattattttgtcatcaagcatagcaccaaataggtagttttttattcttacccgcttcccactctctaccctcaagtaggccccagtgtctgttgttgccttttttgtgtctatatatactcaagtgttcagctcccacttagaagtgagaacatgctatttgattttctgttcttgtgttagtttgcttatgataaaggcctccagctccatccatattacactataaaagacaagatattgttctttttatggctacatagtattccatggtatatatgtaccatattttctttatccattctactattgctgggcatttaggtttattccatgtctttgctattgtgaatagtgccacaatgaacatatacatgcatgtgtctttatggtagaacaatttacattccttcaggtatataattaataatgggatttgctgggtcaagtggtaattttgttttaagttctttgagaaattgccaaactgctttccatatggctgaactaatttacattcccaccggcagtgtataagcattcccttctctttacaacctcgtcagcatctgttattttttgactttttaatcatagccattctgactgggtgagatggtatctcactgtggttttgaattgcatttctctaatgattagtgatgttgagccttttttcacgtgcttgttgactgcatttatgtcttcttttgaaaagtgtctattcgtgttctttgcccactctgtgggctttttgtttgtggggttgttttttgcttgtaaatttgtttgagttccttatagattctggactttattgtcagatgcatagtttgtaaatattttctcccattctgtaggttgtctgtttactctgttgatagtttcttttgctgtgcagaaagtttttagtttaattaggttccatttgtcaatttttgctttcattgttattgcttttggcattttcatcatgaaatctttgtctgctcctatgtccagaatagtgttgcctaggttatcttccagggtttttatagttttgagttttacatttaagtctttaatccgtcttgagtttttgtgtatggtgtaaggaaggggtctaatttcaaacttctgcatgtgactagccagttatcacagcaccatttactgaatagggagtcctttcctcattacttgtttttgttgattttgtcaaagatcagatagttctaggtgtgtggcatagtttatgggttctctattccgttccatttgtctatatgtctgtttttgtaccagtaccatgctattttggttactgtaggcttgtagtataatttgaagttacgtagtgtgatgcttgttgttttgttctttttgcttaggattgctttggttatttgggctcctttttggttccgtatggattttagaatagtttttctcattctgtgaagaatgtcattggtagtttataggaatagcattgaatctataaattgcttcgggcagcatggccatttttatgatattgattcttcctatccataagcatggaatgtttttccatttatttgaataagctctcatttctttgagcagtgttttgtagttctccttgtagagatctttcacctccctggttagctgtattcctaggtgtttattctttttatgcctgttgtgaatggaactgcattcttcatttggctttcagtttagattttcttggtgtataggaatgctactgatttttgtacattgattttgtatcctgaaactttgctgaagttgtttatcagatctaggagcttttgggcagagactatgaggttttctaggtatagaatcatattgtctgcaaacagaaatagtttgacttcctctctttctatttggatgccttctttctttctttctttttttttttttttaaaagagtttcactcttgttgcccaggctgaagtgcagtggtgcaatctcagctcactgtaacccccacctcccagctacaagcgattctcctgcctcagcctcccaagtagctgagattacaggcatgtaccaccaggcccagctaattttgtaaatttttagtagggattgggtttcaccatgttggtcaggctggtctcgagctcctgacctcaagtgatccacccatctcggcctcccaaagtgttgggattacatttgtgagccactgcgcctgacctggattccttttatttctttctgttgcctgattgttctggttaggacttccactactatgttgaataggagtaatgagagagggcatccttgtcttgttcaaattttcagggggtttgcttccagcttttgcctattcagtatgatattggcttggatttttcatagctgactcttactatttttatgtatgttcctccaatgcttaatttgttgagggattataacatgaagagatgttgaattttattgaaagccttttctgtatttattgagacgatcatgtggtttctgtttttagttctgtttatatagtggatcacatttattgatttgcatatgttgaaccaaccttgcatcccagagataaggcctacttgattgtggtggattagctttttgatgtgttgctgggtttgctttgccagtattttgttgaggatttttgcatctatttccattaaggatattggcctgaagttttcctttttagttgtgtctctgccaggtttgggtatcaggatgatactgacttcacttagagaggagtccctcctcctcaattttttggaatagtttcagtaggaatggtaccagttcttcttcatacatctggtagaatttggctgtgaatctggtcctgggctttttctggttggttggctttctttctacgaaactatcctccctattatttatgccttgcaaaaaggtggtaaagattaaatgtatgtaacatacccagcatatacaacgtctggtgcatagtatatttaaattaaaggatagctattagagattaatatagatttcatttgtgtatattgtgcttctacctaagggaactataaattcattaaaatacgggacttaaaataattatttagtggcctcaaggacatcataaatatttattatttattgagtatgtacaactactatatttccataataattagaaataataactttttaaaaaacaaagatgatagcaaccacaaaaaacatttattgagtgaatcacgttgggtacaaatgagtatattgtaaaaagtataccatcaacacactgacaatctttatcagtatttcctagtagaagaaacatgaaagtcggagcaggtaggactaaagaatgctagtgtacacaggaccatcagatgccttttagtagaagaggtctagagccttgcggaagagcttcccaccctgtacagagaatgtgttgcctgttctttgctttctgaaaactcttgcctattatcactctgtgattaattctgcactaggctgtctagagctttcacatttgggatcattttatccccgtctctcaaataagttcatgggttcattatgtcgcacatatcttatcttacatgcaaatgtaaatctgttgcacccttaactcacaggtctgagtattttttctaccacacaaagttttttgcaaaaattaaaaaaattgataacattaaatggttacctgagaaaagaagaaagtcctcaaacccttcactttaaacaactagaaaaataaaactaaaataaacccaaacaagcagatggaagaatataacaaagacaagagcagagagcaattaaattaaaaccagaaaaacaatagaaaaaaataaataaaaacaaaagctgattttttgacattaatgacattagcaaaactgaccaaaaaaagagataagccataaattattaatatcaagaatgaaagagggggtatcattacagatcccataaacactaaacagataataaaggaatactaagaacaactctatagacatagatttgaaaacctagatgaaattaaattaaaattatattagtgaactgaactttcagttaaaagtttccaaaaaagcaaccttctagctcagatggttacactggcaaattctaccaattatttgtggaaaattaataccaattccatacaatctcttccagaaataagaagagaacactctcaatttatgaggccagcattaccctgatgcaaaagacagcgtaagaaaaaaatcttttaaacacaaccaaatatacctaattaacataaatgtaaaaatcttcagtaaaatattaaccagctgaattcttaaacatataaaaacaataataatacaccatgaccaagtagagattgtagggggaatataagactggctcaatactggaaaatttttcattgtagtacaccatattaacagtctaaagaagaaaaatcacatgatcatatcaattgttgcaggaaaagtatttgacaaaattcaacattcattcgtgataaagactctctgcaaactagaaataaaaactttctcaacctaataaaaggcatacagaaaagctaacattatacttaatggtgaaagatgaatgctttttccctcaatttaggaataaggcaaggatattgatactttttgtctctgtgtccccacctaaatctcaccttgaattgtagttcccataatccccatgtatcatgggagggacccagtgggaggtaatttaatcatggaggtgtttaccctcatgttgttcttgtgatagggagtgagttctcatgagatctgatggttttatatggcgattttttcccttttgctcagcacttctccttcctgcccttgtatgaagaaggatgtgtttgcttccccttgtgccatgattgtaaatttcctgaggcctcctcagccctgcagaactgtgagtcaattaaacttctttcctttataaattacccagtcttgggtatgtttttattagcagcatgagaacagactaatacagatatctactcccatcattcaacaaacattttactgggtgccctatccagttaataaagttaggaaattaaataaaaggcatgcagattttcagatgatatgattgtctatgccaaaaatttcaaggaattcataagcaaattccaagtactaaaaagtgagtttaatgagattacagggtacagggttcaacacacaagaatcaaatgtatttctttatactagcaatgaataattggcaactaaacatttttaaaaaatttacattagctccaaaaaatgaaacacataggtgtaagtgaaacaaagcatgaacagggtctgtatgctgaaaattacaaaaacttagtgaaataaagcaaaaaagacctaaataaatggagagatacacagttttatggattgaaagaattaacatagaaaaaatgtaactcagctgggcgcagtggctcatgcctgtaatcccagcactttgggaggctgaggcggatggatcacctgagctcgggagttcgagaccaccctgaccaacatagagaaaccctgtctctactaaaaatacaaaattagccaggcatggtggctcatgcctgtaatcccagctacggaggctgaggcaggagaatcacttgaacccgggaggcagaggttgcagtgagctgagactgtgccatttcactccagcctggacaacaagagcgaaactcagtctcaaaaaaaaaaaaagaaagaaaagaaaatatgtaactctgcacaaattgatctatagatttaatgcaattccaagcaaacctcaggagtatttttacagatccagacaagctgattctaaaatttatatggaaagtcaagggaactgtaataaccaaaacaattttgaagcagactagtaaagttggagaaatcacactatcagattttaagatttaatataaagctgtagcaatcaattcagtgtgatattggcaaaaggatagacatagatcagtggaacagagaagccagaagcagacccacacaaatatattctagttatttttcagaaagttgcaaaagcaatttcataaaggaatgatagccattcaacaaatggtgttggaacagccagacaatcatgggcaaaaaaatgaaccttcatcttaatttcaaatcttacataagaattaactaaaagatttacatgtaaaatacaaaattatacaaatttaaaggaaaaaatttaggagaaaaactggcccagagttagacaaagagttattagacatgataccaagagcacaatcatgaaagaaaagatttatgtattggatttcaacaaaatgaaaacttttgctctatcaaagacactgtataagaatgaaaagacaggctacagactgggataaaatatttgcaaatcacatatccaataaaggacttgtatctggaacacaaaaaaactctcataacccaaccataagaaaataaactacccacattaaagaaagtactgcgttcatcaactagaagtctcaatatagtaaagatttagttctcctcaaattgattcatagattcaactcaattcaaatcaaaatcccaacaggactttttgtaggtatataaagctgattctggaatttatatgaaaagaccgtatagcatagggacaatagttaaaaatactgtattgtatacttgcaatctgctaagaagatagatcttaaatctcctcactatacacatacacaaatagtaactgtagaggtaatagatgtgttcattatggggaatgtggtcattatttcgcaatgtatacatatatcagaacatcaagttgtataccttaaatatatgctattttttcatgtcagtgatagttcaataaaactgttgaaaagtagaaaataaaaataggttatgtgaaagacaaaggaactaaaatatgacaaacaatttgggcaaaaggaatgcaaataagcaaattaacaaatgttaatttgctattcagaaaatgaaagttaaaaccaccatgaggtaccatggcacatctattagaatagctgaaataaaaaaatattgacaagggctggtagggatgtggagcaactggaacttgtatacattgctggtagcaaaatgaaaaacagccactctggataacagtttggcagtctcttgtaaaactaaacaaacactttccatatgacccagcagtcccatttctaggtacttgccttaaataaatgaaaacatgttcacacaaaaacctgtacatgaatgtttatagcagctctattcataatcacccaaaatggaaatacctaaatgtctttcaacaagtgaatgtataaacaatctctgttacatttatccaacggaatactactcagcaataaaaggaacaaactatttgtttacaaaacaacttggatgattctgaaaggtattatagtagttggaagaagccagtttcatgaggctgcatacgtataattagttccattcatatgccattttctaaaagacagaactgtaatgatagggaaaagatcagtcatttccagggattaggaatagagagaggatatgactacaaaagggataacaagagaatttatcttttggttatatggaactcttctgtatcattattgtggaggtagttacagaaacctatatatgtgttaaactctaaaactggacacaaaaacatcagttacattgtatggtaatctaaaaataaaatatttacttgaacttttggtgctgaagaacttgatttgtgtcttaaaatcagactttccaaattttggtttcatttgctccctgggttgtctgtattcatctatcaccagcagagagacagagagagaaagagggagaaagaaagttgattagtttatatacttatacacactaatgaagttggaaaaactttgggtgaaatataatgattttgtgggatgatttatgcattaaggtatatgtggaatatttctggtagagatatttgttatagatgtatctaaaattcaagtaagggtggggaattttatttagaaagtaagagatgtagatgtagatgaaagagaatacatagggcgagaaaaaaaactgagaatagaactcaaggatactaatatttgagggaaaatgagaaaaggaactcataaaggaactcatgagtgtaggaggagaaacagggcattgaagaaaagaaaaaggccatggaggctataatagttcattctcacactgctatgaagaactacccgagactgggtaaattataaaggaaagaggtttaattgactcacagttccacagggctggggaggcctgtggaaacttacaatcatagcagaaaaggaagcaaacacatccttcttcacatggtagcaggaaggagaagaatgagagccaagcaatgggggatacccttataaaaccatcagatctcctgagaacttactttcaggagaataccatggagaagctgcccctatgactaaattacctccaaccgggcccctcccaccagacgtggggattataggaactataattcaagatgagatttggatggggacacatatcagaggccaagaaagttgagaaagaagaggcagcactctccaatggcatggagaagttgagtaagatgaggtttgaaaagtctcagtgtgtttgtccaatagaacagcagttctcaacctttttggcaccaaggaccggttttgtggaatataattttttcatggaggtgaggggatgggatggtttggggatgaaactgttctgcctcagatcatcaggcattatttagattctcagaaggaatggacaacctagatctcccacatgcacatttcacaatagagttcacactcctatgagaatctaatgcccagctgatctgacaggaggcagagctcaggcagtaatgctcgctggcccactgctcacctcatgctgtgcatctcaatttttaacaggccatggaccagtatctgtcagtgtcccagtggttggggacccctgctctagaaggtcatcggtaatgttgcaaaagcacttttagggttgatgtgggggcaagaatcttagggacatagctttagaaatacatgagaggtaaggaagtgccctcataaagctttggcttacctgtatttggattcttgaataaagttttggtgggaagattactcttatgtcaaatcattaggccaagctaagtaagaattttagtgaaattttgcatttctggcaaaacttaaagccaagtaatagtggcctggacttaagctttagacataatctttttttttttttggtagtactcaaaattaataagtcagttcaacactagctgagtacctacagtgttgcagatggtgaaaggtatacaaacatgtacaagaaataagaactgaatttatttaacccaaccttctcattttaaagataaagaagctgagacttaggaaggaaataacttggcccaaggacatgcttaatctgcctccctcctctcccattgccatattttgctagttccccaatttttccctttacataagctactctccaccacaaatatagtacacatgcagaagatactcataactacatggctagtccatttctaaatgtattcatgtagtttgttgaatcagatttttttttttttttttttgagacagagtcttgctctgtcacccaggctggagtgcagtggtaagatctcagctcactgaaacctctgcttcccgggttcaagtgatccttgtgcctcagcctcctgagtagctgggattacaggcatgcgccaccatgcccagctagtttttgtatttatagtagagactgagtttcaccatgttggcgaggctggtctcgaactcctgacctcaagtgatctgcccacctcagcttcccaaagtgttgggattacaggcatgagccaccgcacctggccttgaatcagatatttatgagaaaagagaaagtacctacctaggcagtagctggcaacaaattcagtgtgcagagggtatgattgcaaatggttgtgtaaaggaagaagaggtattaggaaatagattgccttttgaaaacaaaacaagacctttggcagaaaaatattggggtagataggtacatattaacagatatttgactctctccctacctggggattattcttctagaattctttgctaaaactctaaaggattcttggtttgctctaatgagacaggcagtttctttaccatacttccagttagtgttttgagggaacatggaataggacaatatggctggagtttgcctccaagatgaattggagaggaagagtggatggcctttaaagcaagactaagtttagaagcacagtgaataagcatgttcatgctcaggttcggtgggtggatgtctgcttgagttcattcagttacttatggggtgtgtaaccttaaaaaagtatcttgacctctttaagactcagtttccccctctgtaaaatgggttccttgtgagtacaaaagatatacaatatacctagtgcagtgccagacttattaaacaaaatacttcatattagattttaattttatgattaattagaaatgtggttctattctttaggaaatggccaaggacacggcaagccaacattttcagacagaaatagttcctgtcttttgtaaattgatctttgtgtggcttcagctggcatgactaggcccctcgatgggaattgcagagatatttagagttgaatgcaaagcctgagctcaaatgggataaatgatgaagcactactaaagatataaatggataggcacactacaccagggggctggtgggtgggagtggaggcattatttgtcaagtggcatcaatgtacacagctgactgtgtctgtgtgaggagaggagatggcagttgctgttgcaaaagggacctggaaacagagagcagcatgagcaaactgctgatcaggtttctttaggaggatgaggggattataatgttctgagagattactgaagcttagaaagaggaagtagtagaatcacatcttcctgcccctgggaatttatgctgctggataccatgtttccaatgcttcttattttatccattcctttacaaagttattttaaaataaagatgaaaacataggtgaaaaaatgtctaacttgtttgtttattgtagatttactcttggattccaaagtaaagaggcaatggcacagggggtgctgtttatattcctttcatcaatcattgctgcaacttagatatttagtatatttatgcctatacacagatacatatgggcaaaagatattctataaaattcatttatgaggactcacagttgcacctctcagaaaaatttctcctccagtcattaaaaaaatttttttatgggcttgtaattcagttacctcttccctggaagtaaaattccagggtagaccagaaaactcactaacaaggcccagtggtcttaaaccccggctgcatgcaaaatcagcagtaaacttaaaacaaacaaacaaaaacaaaaacaaaaacaaaaaaagtatgtgcctggcctgggtctcattccagagcatttaagttagactctctagaagtaattgtcttcagtttacgctataaaaatttaagattttaaaaaaccaggccgggcatggtggctcatgcctgtaatcccagcactttgggaggccgaggtgggcagatcactttaggtcaggagttcgagaccagcctggccaacatggtaaaacaccatctctactaaaaatacaaaaatcagccaggcttggtgacgcatgcctgtaatcccagctacttcggagactgaggcatgggaatcacctgaacctgggaagcagaggttgcagtgagctgagatcctaccactgcactccagcctgggtgacagagtgagactccatctcaaaaaataataataaaaataaaattcaagttggcacaacatttttagctcttataacaaaattcttgacttaatgaatcttctgtgaataactttgggagtattaaaactttgtaaactctgacccagcatatccatcctgggtaatagagcaggaggaaatggtcatggatgcatgcaaaaatgtatcaatcttgagtcattacaataatacttttaataataaaaatcagacgcattataaatgtgcaataagaagagatttttctttcaagcatggtacatccatttagaggtctactttctagccattaaaaataatgtaagagaagaatttaatgcatataacatgcatgcaattcataaagagaaaagaaagatattattcaagtatggggagatatacttctttgaaaaaaatccatttgaatagaaaaaagaccaaatgaatatattccaaaatagtaatatgcattataaagaaatagcatgagaaatgtgatgatttttatactcttccttaggcctcatattatttttcagattttctatactaagcatgaattatttttataaagagaaaaatgctattaaattaaaagcagttatagaactctaaagatttatattaaaatactactctgtggagctgcccacttcatatgtttaaagtaactgacaccattttgcatatgctacctgtgtgaatagattccataaataaaataggcttataaaaacactgttgatttttgtgtgaaagtaaccataggtaagtccttcttcaatgtatgactttgatttaggaagtggagtctggaacaactggcttaatttgacaaaggtagaggaagatgaaattttatgctctgtgattggtttttgcagttgttctgaactaataggttgctttcttctttaatgtgttataatgaggaacagctgctatgagctgtgcagttcgtttttttccctcctttcaaacctccatctcctgaagttaaatcaatctctgtaattaaagaattggtgaaataggcaaggaggtgggctggcaaatttatatattctgttttaaaatgtttaatttaagtatcatgtggaagaactggactgttgtgacatggtggaataacatttacattttccaaaaaagtgtctttcaacatgtgttgttagacctggagaacacaataatattaattaattgggcattcgatgtaaaccacaaaagtgagcagactcacttctccttcaagttgatgggagttcagatcaaccaagaagctaaagatgagatgaattcaagactacactgtttgaagatatatcattatcccttgtgaaagagtaggtgaggtgtggttgatcctagtaacttcatggactaaaaggaaaaaaaaaagtctcattccttgagtatatttcctagttgttttggtgttttgataggtttgttcccaaactgaactgaaccagaaagcccctatgacacctctttccaagggaaagatgcacctagaaggagctgggcctctggtgacagctggaggagtcattctgaagcctcacctcccacatcactgtcatctctaatagtggagactggttgaacttcggaaagggaaaaatcgatggctgaagatgagccttggtgattgtattagtcaggattctccagagaaccagaactaattggaggcccagaagatccatgattgtttctttgcaaactggagaaccagaaacgccagtggtgcagtttggtccatgtccaaaggcctgagaaccaggatgaggtggctgatgctagtcctggagtctgaagacctgagaaccaggcgctctgatgtcgaagggcaggagaaaatggatatcccagctcaagaagagggcaaattcttcctttctccaccttttagttctatgtgtgccctcaacagattgggaaccttaatgggggtgattattcttatcctgtgaggtaagaattagtgaaagtgattattcttaccctatcaattcaaatgctaatctcttctggaaacactctcacagacacacccagaaataatgttttaccaactatcttggcatcctttagcccaatcaagttaacacataaaattaatcatcacaagttcactaaccccttgtcaagtccgcacttatgcatatctctttaaaccatacttaatctccaagtaaatacaataacaaggtcaaaatcccatgtaacatcatacaactaacctgtgtacaaccaaaaacacactaatcccttccctcaaagaggaggtaaaattcttgagtgatgttttctcttctcctggaatcctgtaacttaaatactatgatgtaaaattaacaccatttaaatatggatgtaaagtcaatatatcttttgttactatgataagggaataggaaagaatacaaagatattttctttacacatacacacatgcacaaatatatttataacagaaggagaatatatgcaggacaattacagttctcatttctgtaactggttacatggttgtaagctgatatttataaggaccttcttctactaccattctgtattctcactgctttcagcaagcacctcagctggttgtggttctttaccacaggataaaggtgacccaaacctttattcttgaagggtctgggccattcatagttttgcctggactgggttgttgtagttcctattgaccttaatcacaggacatggcaatactcagaaactctttaagaaatctgtattccacacatactcttctttacctccattgtttaggagtagttcaattttggtggtttggatcaatcactccagccaacactgtaactcccttctttgcttattgacatagaggcattaggagcccaacatggttgggtggcagtcttaacttccagttcaatggagtcattgttgtatctcctggtggaagcagtcttccctctagaactatgacctctaggccagtagagcataaagtcatggaaacaagaagcaaaaattttgccagtgtgtctccagggataatagtgaatgttgccacaaccatgttcaccccttgattcctggacctgtgattctggctatgggagaaacagcaccatatattggttgctgattcaaagtatatggagccttatggaggaccatgcccaagcactgcacctagctggagctgtaacgtgagtctcaaaaggccattccaccattttatcaagacagctgcttcaggatggtagggaacaaggtaacaccagtgaattccctgagtgtgggcccattgctgcaattcttttgctgtgatcagaagtaatgcctggtagaataccatgatggtggataaggcattttgtaaatccatggacagtagttttgtgtgcagggaaggaaaatccatatgcactgttgtctattccagtaaggacaaaatgctgctccttccatggtagaagtggtcagtgtaatgaatctgccaccaggtagctggctaattaccctggagaatggtgccatactggaggctctgtgttggtccctgctgctgacacattaggcacttagcactggccataacaaggtcagcctaggtgagcggaagtccatgttgctaagttcattcatgacctccatccctgccaccatggccactttgttcatgagcccactgcgtgatgacaggagtagcaagggaaagaggctgattagtatccacagaacaggtcatcctattcacttgactattaaaataccctttggccgaagtcaccttttggtgagcattcttgtgggctacaaatatcttcatattttttgctcaaagagatctatccatatatctcttccccaaatttcttgtcaccaattttctaattatgtaccttccaagttcctgaccatccagccaaaccattgactatagttcttcaatcagtatataatcacatgtctggacatttttccttttaagcaaagtgcacaaccaagtgcactgcctgaaattctgcccactgggagaatatcccttcaacactgcctttcagagatgtcccagagagatgttatagtgctacagctgtccactcttgggtagtgcctgtatatcacacagaaccatctgtaaaccatagccaagtcttcacttcctctgtcaactgactgtggggaactccccatggagccatgggtgcagctggaagaagagaaggcagtagcaggaatgaggaccatggatcacttgatgtgacttctttgtgtcttcagggcttgcttgggcccaattacatatataccacttccacttgatgatagagtgttgctgtgcatgcccaattttatgatttgatgggtcagataatacccagttcatgataggcagctcaggttgcgtagtaacttgttgactcctggtcaagtattcagtttccactaaagcccagtagcaggcccagagctgtctctcaaaagaagaatcattacctgcagatgatggcatagctttgctctaaaatcctgaaggcttaaactgcaattcacctatgggagcttgccaaaggatctaaacagcatccctgtctgccattgacacctcaagtaccattggatctgctggatcatatggcctaagtggcagagcagcttacgtagtctcctggatctgttgcagagccttttcctgttctgggacctactcaaaactagtagttttttttgagtcagttggtaaatgggccagaataacatgcttaaataagaaatgcattgcctccaaaatccacataggcccgctagccattgtgccttttttttttttggttagaggccaggtgcaacaacttagccttctccttggaagggctatttcaacatgcccacaccatagacccctagaaatttaactgaggtagatagatcacacctaaactttaattggatttatatcccaccctgtaacacgtaaatgattaccaatcaaatctaaagcggttgctactttttgctcactaggtccaatcagcataatgtcatcaacgtaatgaaccagtatgatgtcttgtggaaggggaaggtgatcaagatccctgtgtgcttgacattgtctaaattatgacatataactggagagttaatataaccctgaggtaggaaaatgaaggtgtattgctggccttgccagctgaaagaaaactgcttctggtgggccttattgacagagatggagaagggggcatctgccagatgatagctacataccaggtaccaaggggtgtgttactttgctcaagcagtgaaactaaatctagtacagcagctgcaattgtagtcaccacttggttaagcttaccataatccactgttattctccaagctccatctgtcttctgcatagaccaaataggagtgttgaatgggaatgtgatgggaatcgccacccctgcatctttcaagtccttaacggtagcactaatctctgcagtccctccaggaatgcagtattgctttttatttactattttttgaggtggaagcaattctaggaactgcttctccttggccctcttcatcatagcccccagtccacaagtcaaggaaccaatgtggagattctgccagtggctaagtatgtcattccaattatttcttctggaactgggaaataactacaggatggattctgacacctattgtgagatgaacttgagctaaaacttccattgatcacctgacctatataagcccctcctctgaatgagaggctacagtgacattttgggtttcctggaatcagtgtcagttcaaatctagtgttcagtagtcccccaaaggtctgattatatgttttaccctggtgcacagttaccctgctaaaattctgtaggtcctttcggagaaagctgggagaaagattcacagtataaattttcatttgagggcttctgggtctgtaaactggctcaagtctgaaaattgattgaggggctctgactctctaattttatgattcaatttaaactttggttcatttgacctggaacttttctgtttatacagatcaagtaaaaatttaataggctttctatctatttcacttctaggaacaccatgattaactagcccacgccacagatctgtgtgagtcagactattctaattgctgctttgactctgccacccaacacagtaactacgcccacctcgcctttggcagtggaatgctgccacttggcctcaccactctggatccaattactcccattgcatttagattttccaattaagtggctgtggttcccactataaggtctggcctacaaagagtaatcacagagttcttcaagaatactggggcttcctttagtaatttatttcttaaagtattgataaaagtgtgtcttctagatcttctcagtgttggggaatatatcataaattataaatccactctttctaatctccctaagcctgtgaatcccttcctctacattaaacctagggagagccgacatttccaatttgcttacaatgggccatcttttgattgtgtttcagccaaccaatcaaccacattattagagccttaactcccaagctgtaatattaaatgcagaatctctgcttagtgggcccacatcaataaatttgacctgatccaacattatgttccttccttcattatcccacacccttaatatcaattcccagacatgtttcctagatttctgcttgtataaattagaaaggttaggtagttcttttggaatatagcatgcctcctcatgggccacactttgtacttcccctttaagggcctgctagggtcttgagtctagttatttgtctagaagaaaagaggagtgttggaggtagctcttgtggagaatcagcagtgtcttgcatggcagctgcctcagaggaggccattcctcaggcaatgcagggctaatcccttcagatggaggtaaatgactcagaccaatgtgaatgaggagatggctcctactggaggtggggatgctgttgacactgggagtagggggtcatttctgctggtattagggatgccacttttgctgggattagggagaccaactactctgggggtgggacctaagctctactgagggtggggagacttctttcactgccaaaatagataatcacagtttagggactcagtgtccccagcttctttagagtcttcccacatacccccatcccaacttgcaagatcccattttttcacagtgtcctcactttacagtatataccttgtgaggctgagagtttcacttgtgttgtaattcagccaattacaggatgagatcctacatttgattttcagcaattttagccctgcactgcaggagataatgctgtccctcagggcacacctataagctcttaggtcatttatgtagcacttgaggtgggaatttgaatcccttagctcatttttttttttgtaaactactttttccagtgattcagtgtcatattccttagttttccaaaagtgttcaaagctaatatatacagagttactaagctccttgcatcttagaagtgtttgattaggaatatccatattttgtatatatctacagtttgtgccacgaactgtttgcctctttactactggaaaaggaatcattatcatctttaaactgtgtcagattagaaagccaatttcagaaactgcagaatgattttttttttaaaaaaccctcacttttgaaaatctgtttctccagagccaatctcaataccaaaatctgtattagccaacgttctccagagaaacagaaccaatatgtactatgtggtggtggtgtgtgtgtgtgtgtgtgtgtgtgtatgtatgtgtgtgtagtcatcccttggtatctgtggggtattggtttcaggaccctctagtggataccaaaatctgaagatgctcaagtcctttatgtgaaattatgtagaatctgcatataacccacataatcctcccatatactttaagtcatctctagattactgactatctaatattgtattgcttagggaataatgatgtgacaaaagtctgtatatgttcagtacagatgcaaccatccatttttttctgaatatttttggtttgcaattggttgaatctacagatttggaacccacagatacagagggctgactagagaaccaataaaagccagtggtataattcagttttaagtacagaggcctaagaaccaaagaaccgatgatgtaactcccagtctaagtccaaaggcctgagaactagggtggttggttggggtggtggctgatgttagtcagtcctagagtctgaaggcctgagaacaaggagctgtccaagggcaggagaagatggatgtcccagctaaagaaagagataatttgtcctgattctgcctttttgttttatgtgggccctcaatggaatggataatgcccacccacataggtgagtgtgatcttctttacctagtctaccaattcagatgctaatctcttctggaaacaccctcagagatacacccataaataatgtgttgccagctatctgggcgtctcttaccccagttaagttgacatataaagttaagaggtcatctgcttacctgtgccatttcccagttgatgaagcttgccacagtttatccaagaatacacggagtgggaaaggtagaatttagtttgcccaggtaatgttctcgcagtgatttccctctgggcctcccaccaacgctgtctcttgtgatgaaactggggagaactgtagggaggaagataatttctgcctctcaaaactcacaggctgatggaaggagatcccataaagcatttattgtagaaaaggaagaagtggcagaggaaaatgctggagaaaagaagatagaagaacaaagcaattgccaagcccaggtgtaaggtgaccaggtctgcctgggatgatggcagcttgaatggtgaggaaagacaaaatgtgagaagaacatgtaagaagatttgaccatgtttgtatagagactatcttccttggttcatccttaaatgaaatgaaaatcctgtagcaccatttctagcatttggtaagtactcaagaaacgtgagcttttactgaccatagactgaacatataggctactaatgagaaaattcctatacttgaagaagcctaacttgctaggccaattttatatttttgctgggctgccatagggttagaattaaaggcacattaaaatatgtattaaaaggccaatagtggtggctcatgcctgtagtcctagcactttaggagggtgagacaggtggaacacttgaggagtttaagaccagtctgggcaacatggtgaaaccctgtctctacaaaaaatacaaaaattagcctggcatagtggtgcatgcctatagtcccagctatttggaggtgagatgattgcttgagcctggaagtcgaggctacagtgagctatgatcatgccactgcactccagcctaggcaacagagtgagaccctgtcccccccaaaaaattgtattaaagatacattataatgtgaatgtgtctgtagtatacattaagtctttatgtctgtaaagacatgccacattctttctttttctctctcagcatatgtacacacatacatacacacttaaatctctgtgtgtgtacgtgtgtgtacatatgtacacaaatggcacattagctttatctagaaatggatacatatgcattaagctactgtaaagtttatgcacacttaaaggcacattaattctatccaggcatatttctctataatgtactgtatatctgtatgtatactaatacattattctatcatccatcataaatttctggcccccccacaggaaatgaccttgtattttatgatcaatgcaaggacaaaagattttgcatccttaaattatattcaatacatactctgtgaataaaaatgccataacttaaaatattgcccttggtatttgcatagtgcctttcattactgttgaacaaaaactaatctatgcattcattctgtggagataagttgtataaatgtgataagtgagatattttcttccttagtccttaaaatgatagtgtaaggaaatggaattcttttgcctggagatgagattacccaagggtataatatttccagaatggatactatgaagttgtaggaagttgctgtatctcattttcagtgaggccacaagagaaaattgttgtagcaagaagttgtggtttaggctttaaaatgcctttgctgtgaggttaacatagaaggaatgggccattaaagaagtttgtatattcttccttttttcgatgtttcaataaagtaaccagttctttgaggttaagtcagtctgttcgacagcctattctaagaagaaatggcgccttcctacccacagtgggtgagtctagggaagtagttttatatcaccacaaccctgatacacctttctttcccccacaacatgtgctgattggaccagggatgggaattgtaatgacgggaaaccaattagaaaactggtcagagacaccatgtagcctgacattaaagaatgaactgcacctatcctgtttactttttcagtaaattactctaagagaaaatgtattttaacaatgggagctgaagttgaagggaagccatgaaatagaggggagttgtctctagccatttgcttagaaaagtagcagggacacacacacacacacacacaaaataaaaacaataagacataagacctacttactatttgataacacaacagggtgactatagtcaataatttaattgtacatttataaataactaaaagagtataactgattgtttgtaacacaatggataaatagttgaggggatgggtactccattttccacgatgtgattattacgcattgcatgcccgtatcaaagtatctcatgcaccccataaatatatgcattatataccccataaacctaatatgtacccacaaaaattaaaaataaaaatgaaaaaagtagcaggtaatattaacaagcagaggaaattatgactagaaagcggaggttggatagacgcaggagagagaaaaatgagcaagaatgctcatgtgactaatgagagacctgctttaattcgtgtcttcccagacctcatgccatgcaccctattcccattttttcttaaagaacttgagagtctgtatcagttagatgatttgggctgcaagaaataaaaatagtcatctgaaagcagtgtaaactagggacatttattatctcacataacatgaagtgtggagaccagcacggttttaggctgtctcagtgatgtcatcagggatacagttccgttctatctttcctatgtgctgtactcatcattttggctgactttggtgcattcttgtgaaattgagttgcttctcagctttctccacggagggcttacattcagctcattcagctttcttgggtctgcaagtcagttctacttgtctgtatgcttcctactttgtaaaattttcttggtcttctctcccctcctattttcctcattattacaaatttatgccttaaaggaaataatactattattttagtggtgttttgagaggaaccagtggtaaatacatgtatttaatcatttaatctgatctgccaactttattgtgaagtcccttgcgtctctcttttaagatgaaagacatttacttgagaagttttctcactagacttcccctcccatatcattggccaagatggagctatatgctgtatgcagaagacagagtcataagccaatcactggcaaggggaatgaggtcactttggcttggacaaattgccattcacttttggcaatgagaaggagcaccttcctttgagcacatagctgtatggaggatgaacaactagagaatgatcttcaaaatactgaacaatggatggagcatggaccaaccagtcaaaatgggcatgctacccaaatagagcaaagaaaaccctataaatacccaaatgaaatctggttcaaccaacaaggaagaagatggaaacaaaagtcttggtttctagcacctaaataacaattgcagaaaataaagtacacaactgcttcagaggaaggaccaaatcacctcataaggaccattccagcctgtaaatttttacgcagaagagaattgttccatttaatgaatattttattaaaggagtctacaacctgaactgagtatcactgcagggagccagagtacatgtaaattacagggttgtgggcactttccaattctggcacaacctttatgtaaaaggttaccctagtcctttaagagtgaacttttagagaaaggttctacctcaatggtatttgcaactaattggctttatcttacttgccagctcttgattgatgaagctggctgaagggttggattgaatagaactcggaggttgagttggaatcagctggaaagagcactatgttcatttggcagtgtgtgtgtgtgtgtgtgtgtgtgtgtgtgtgtgtgtgtttattggcatggggaatggcagcacttgggccatgtattttctctcttctttcaggtcagttttgtatgggctgagactccatggagtcacctaagctggaggcttccaaattacaaactgtacctaagacaaggagacgacctttcttagtgggtgacattcttagtctaggaagaggagcattcctgtggaagagttctcagggatttgggtaacatcagagtcagaaggaaaaggaagttttgttgagtttcatatttgagaagaaagctagaaggcagaagtccaagggtgtgtcagttattttgaaaagtaaaacatgaagaagagaagtataaaatatttccaaagctctgggtttaatgacaccaagtttgctagttttgtttcctggtggtaattagcagtcaaacaacatgtgtgctttgggtcatcaaatattattgtgggtagggagagcagccagtcttgagcaacatgatttcaagggattgagtgagtgatgaaaattattgcaggataggaaagcaagttggatttctggtaactacagtaaagaggaaaagagaatgtgaagaatagactgacagggaagctctaggttgagcgacagaaaggcctgtgtggaggtttccaaatatagtgccttatactactcaaagcccttcctattgtcttgtataattctcttactactctttggattgggtacacttgatatttttagttctgtttttctgaataagttaattttcagagaaggtaaagtaacccaaaagtacacagctagatggaagctgatctaggaccagaaatgagttctttcaacttatagatcagggcctttcctactatcctgcaaggccactgagatctaaaacagaactgtctgatctgcaggatatctagaagtatattaggcacaggtgggggtgtatgggtggggaagacagtattccaagtagaggaaatagcacttgcaagaccctggggaatgagagagaatggtggttcctaagaacacagagcagacccgtagagcaagagcaggaaaagcaatatggacactggtgtaagatgaggctaaacatgtagcaggggccagattctgaagcctttgagggctagcattttacttatttagctaaatctcacactcaccagcagtttcctttctaaataggatcaacatgcatttctttggacctttgctgacaccaaatggtaccagtctttgagcctctcaagtgaggtgggaggtggggaaaggaggacataaaattagcataagtacataaacctagttgcacaccagtcttagtatgagtaaataacatgttctgcattttcatgtgctactactttccaaatgaatatagatgttatgatgaataaaactcaaattcatttcaatgtactcctgaattcctgggagcttttagctgttatgcatataacccttctgcctcttgccttatcggtctgtgacaacaaatacagttacaactccttttgctctacaaattattgtggcttgaaagttgaccccactcaaagtatcatccagctatttctgggtatttccatggggatggaatagatcccttgggctcttcctacctgagtttctccacctcttctcttcttctctgagtttcatgctattgtccatgctctgttctccttgtggttcactgcttttctgtgcctatctttgttcattcccacctcccatgaacccatcactacctttctttattcccgccactcctgaaccccttactatgtttgttcatttccattggtcatgtcagcactgctattgttgggctcaaaggctgagatagtttgttttctacatggaatggaactgtgacagaatctcctgagggttgagggtggctctgtcacttccctgagactggcctcttctccagccatcatctctgcacttctacacccacagctgcagctgatgtaagaggaccagcatatatgcttgtggaaagcccagacttgctcttactacactcttctagcctccccagttgtacaagggctgcttactcccaatgatgaaatttctctgagggtttgatacctaggatttcagtacaaatggcccaacagaaatagaggaattcctttcttcctctagtccggggatcagcaaactaactcaggggccaaatccacttgtttttataaataaaatttcactgaaacccagcaacacctattttatttatatattgtttatgactgctattatactacactggcagagttgaggttatgacagagatggtatgacctacaaagtcaaaaatatttactatctggaattttacagaaaaagattctcagttctttatctcatccataaaatcattcaaggaattgttttaaaatgaaaagtgggtgatatgatcagatttatacttttcaaaggtcactccagttgtagtgacaagagtggactcagggtgggaaaataaaactgtagacagagaccagataagaagctgttccagtaattcagagaagaggtgatggtggcctgaaccgaaggaacaacagtgaaaatgcagagaggtgatggatttgagaactattgaggaggtagaaatgataaaacgtgataatggatcaggtgcttcatgcctcttctctgacactcagccgccaggctctaggtactagaagtctgatcatggatttgcttctttgtttctgtggtctcctgattcctgtctgggtcttcttctaaccccactggagcattagagttctattttcctacttttgcctgattgctagggctctgctgcctcttgactatcctctgtgaggcaattaggggaattcagtattaggatccatgtatcttgtctttgtccaccaatagaagatactgctaacttggacttgcattgccttctgatattataggcagaaacctctgtgagaggttctgtgatttctctgtcaggctgaactttctgctagcagttgtgtattccaggaaatgaatatagctctaaatccaaattctcacagtttgcttggttcttttacagtacttgagatgtgctgggccaattccaaaggtaaagaagagtaggtgggtatcctggggcttcattatattaaaagtgctaattctttgatttttattcacttatctcaactgattaataatttttgatggaatgagaaaagataactctgttttagtcttccctctagggttctgtctttgtttattctatatccctatatgctgataacttcctagtttctgtcctagaatctagcatatatccagcttccactgaattcctccacctggatgttaccaaaacactcaaggttcaatctgtctaaaacctgaaacctttatcttattgctccttttccttttcttcttcccatatcctttgtgctaatgaatggccccaccaatcaatcctgtcacacaagcaaaagatgtggaagtcatcttggagttataaattcttcctatttccttactctacaatctatcaggattctgtctcttaaatacattttaaaaatccttatctcttctacattcttgctgccttagtttagtctttttatgtctcataatgactagtcatttcctggcttgtctctctgcctcttgtcctgttctgatctaatccttcaaggacaggaacaaaatgaccatcattttagtagcctcagaactgaggatgagatgggaacacagaaggtccttgttgaatatgcaccaatctaaataaagaggaaaatcaggatcacatgtgtcttttccttttgatactcctgatctaagattttctcttgtcggtatcttccttctggttcctagaaaattcctcctatgctatggaagacctcaaatgaggtttctaccaagactttgagaagatttgaagcttttttaaaataaaaagtttagctttttcacaggcactgttatggctcactggggaggtgggaaggccttctgctggggtgagaatacaagtcaggctcctaaattttcataacggaatgtcagccttgccacctgacagtctaaaacatatgcccaaagcatatggatctcttttcaatcaacacaacgtcttcacttcctctaaagagctcaatcttggactgactgatattcagccctatccaagaagctcagctaaaaagagtgatatttgagagatatttggagctaatcattcagtctctaagtttggactacaagttaaaaattcgtttggaccacagctctaattccattagaaatgtcatcagtgaataacatttaagtaatgtgctttctgatttttttccctttttttttttgagacggagtctcgcactgtcacccagactggagtgcagtggcgcaatctcggctcactgcaacctcctcctcctaggttcaagtgattctcctgcctcagcgtcccgagtagctgggactataggtgtgcaccaccagggccagctaatttttgtatttttagtagagatggggtttcacaatattggccaggatggtctcaatctcttgacctcgtgatccgcctgcctgggcttcccaaagtgctgggattacaggcgtgagccactggtgcccggcctgtgctttctgattttgtgcaggattgataaaaagatgcctactactgaagaatcacccccaaagtatttttccattatcttaatgtgtctttgagaaaaaaaaaacttctaaagaagtagcatgcttcttatattgggtaatgagaactactatagttctgttcaagacaaagtttcaacatctgagctatccctcttctttggataatagtaactatagataaaataacaaaagagaaaatttaaaatacaataacactttaaggaacaaactaaatatgtctttgactagaaaagaacagaaatgcaaagcagtagggctggagatgagtgtctgctgggctgtagcactgtaggcaggcagagatgattaggagttcagcactcacaaggtgacaggatctaaaagtgccaagcaggtggcaaccagacattggatcattgtttgaaatcagggtctgaggtggagtaccactgcataaaaggaagcttaaaaaaaacaaaaacaaaaaactgctgtctaatactaccagaatatcaagaaaggaagtaaagatgaagctacagttttgaagccagagcttctgtgaagctgccttctggctcagtgacgagtgataatgtcacaattatcccaatgaggcaggaacactgatataacaatataagatgtatttctaatttgggatcctaacagggttggctgagggccattgaaaacccaccagaaagggaggaaagagatggaggaagaaaagcctaaataattgacaaagcttccgcctacccaagacaaacctgaaaatctaaattccataattaatgaagaaaaaaatgctaaaaatagctgtgaagataaattattgacatcaattccttctcagatgaagtgaaaataattatacaatctgaaaaatgctttataataagacatttatgatctttcacagataagataaaaaggaaaaacattcataatgaagactaagaaaatataaaacaaaaccatgcaaaaatgatatgataacaggcagatctaaaaatagcttattaaaaattagagaaataacatggcataaacttttgaaaaggcaaaagcaaagagagaattagtaaatcaaaaaaatagacctgagacattatgaaaaagcagttcagagaaagggaaggaggattgaggaggtgaaaggtatagcagaagctccagaagaagagagaaaagagtgaagtagcaacagttgaagagactttggctatgcatttttcagtgttgaagacacaagtctcagatgacaaatgtaatccaggttctaagaaggatgaatgaaaataaatgcatacttagatacatcttagtaaacttgaagataaggagaaaatattataaagttttagttatgcaagatgaataagttctagagatcaggtgtacaacattgtgcctgtagttaacagtactgtgttttgtacataaacatttgttgagagagtagatctcatgctatgttcttaccacaataaaacacaaagcaaaacaaaaaactatttgaaggaaaaatcagattcttaaagaatggccttggccgggcgcggtggctcatgcctgttatcccagcactttgggagcccaaggcgggcggatcacctgagatcgggcgttcgagaccagcctgaccaacatggagaaaccctgtctctactaaaaatacaaaataaaaatacaaaattagccgggcatggtggcacatgcctgtaattccatctactagggaggctgaggcaggagaattgcttgaacctgggaggaggaggttgtggcgagctgagatggtgccattgcactccagcctgggcaacaagaatgaaacaccgtctcaaaaaaaaaaaaaaaaaaaaaaaaaaaagcatggccactagcagacagttgacttccaattagcaactgtccaatagagcaatatctacaaattgctgagggaaagccactgtcaatctagaattatatgcctggcaaaaccacctatgtgtaaaaggttacatcaggccaggtacctaaacataacaaggctttcccgggaaggaaacatcggttctcacaacatcatttccttggatgcttactgagttaacataaatatggaaggccaggcacggtggctcatgtctgtaatccgagcactgtgggaggccgaggcaggtggatcactagaggtcaggagttcgagaccagcctggccaacattgcgaaaccctatctctactaaaaatataaaaatgtgctgggcatggtggcaggcatctatacccagctactcaggagaatcccttgaacctgggaggcagaggttgcagtgagccgagatcacaccattgtactccaacctgggtgacaagagtgaaactacgtctcaagaaaaaaaacccaaaaagataaatatggaatactgcatgctaagagctaatgatctgtcttgtttactctgaaattcctgattagagagagcatatctggactgagattattctatgtgggcctacaagttttgggcctatatgacaggaacaatatataagagaggtgggaaactaaggcagtagcttctctgtgctaagtgaaaccatatatgtgttgaagtcatccccattttctgtacacatgctgtgtaggtaaggggagataaaggaagctgtgcatacatatacttttaggacctctaagtagtaataaggctgtttttcttgacttctatgcttctataaatctgaataatttaatgatagattaaatcctattgtgttacatgaatttgattccagtcttaacttgtgatcactgctagtaaaataaaacattttttcacatacaaaaattaggagacttttccactcacaaactattatggaatgaactataaaggatgtactttagcaagaagaaaattgaactcaaggaggaagactgagatgcaagaaacaaaaccaagtagagaaacttaaaaattaagtggataactaatggttatctacccaaaggaaaataagtaattatacgaaaaaagatacttgcacacacatgtttatagcagcacagttcacaattgcaaaaatgtaagccaacccaaatgcccaccaatcaatgagtagataaagaaactgtgagatatatatatctagatatatctatatttatatctagtatctagatatttctatatttatatctagtatctagatatatctatatttatatctagtatctagatatatctatatttatatctagtatctagatatatctatatttatatctagtatctagatatatctatatttatatctagtatctagatatatctttatatctagtatctagatatatctttatatctagtatctagatatatctttatatctagtatctagatatatctttatatctagtatctagatatatctttatatctagtatctagatatatctttatatctagtatctagatatatctttatatctagtatctagatatatctttatatctagtatctagatatatctttatatctagtatctagatatatctttatatctagtatctagatatatctttatatctagtatctagatatatctttatatctagtatctagatatatctttatatctagtatctagatatatctttatatctagtatctagatatatctttatatctagtatctagatatatctttatatctagtatctagatatatctttatatctagtatctagatatatctttatatctagtatctagatatatctttatatctagtatctagatatatctttatatctagtatctagatatatctttatatctagtatctagatatatatatggatatatatgtggtaactgtgatatatacatacatatatatataaaatggaatactactcagcccaaaaaggaatgaattaatggcatctgcagcaacctggatgggactggagaccattattggagtaactcaggaatggagaggcaaacatcatatgttctcactcataagtggcagctaagctatgagaatgcaaaggcataagaattgacacaataaaatttggggacctggggaaagggtgagaagggtctgagggataaacgagtacaaattgggttcagtgtatactactctggtgatgggtgcaccaaaatctcacaaatcaccactaaagaacttgctcatgtaaccaaacaccatctgttccccaataacctatggaaatgaaaaaattttttaaaaagttgaatggaaactcaaaaaaaattaagtggataaggttttttttttttcaattaaaaagtgaaacaaattgctaaaccacaataatagaagataaggtgagtcttcactggatacttaatgtgttaacatctttgtcctatttgagaggaagatagagatactatgctgaatgactttatactctccaaaaaaaaacactgaaaaaaggatacagttttaaaattataaagtatatatttttaaaacttatttaaatacatattttatcattttaaaacttaagaataaccattaaaatgagagtaatattctccatagcttctgaattcacagagcaaaaaggagtatagaaaattttatcagtaccccaggaggtagaaaaggaggaaaaaaagaagcaaaaagaaaggaggagaattagataaccaatgagttttcgtttttcctatggctggcaggaagaccagataaaaaatattttccaagtatttcatcctatattcctaatatgattattttcacttttcataagatagtttcatttcttttgccttcattttggatatctatatagtcaagtttaaaaaaagccacaagaaaatcacatggggggttagggcttcaacatatgaattttgggggatataattcagtccataactaccctgaacccctgtcctgcagtaatgccctgccctctctggtggagcctgtgtgtgaaaccctgacttccatctctgccctgcattaacaaggaaacaaaactggtaaattaaacttcatcaaaattacagtattttgctctgtaaaatacctgctacaaagatgaaaaaacaagctgcagactgagagaaaatacttgcaaattacttacctaataaaggacttatatccagaatatataaaggactctctaaattcagtagtaagaaaacaaacaatgcaattagaatatggtcaaaatcttaaacagacacttttctaaagatgacatactggtggcaaatcagtatacgaaaaaatagcctctaggaaaatgcgaattaaagctatatgtgctaccacacctattagaataaccaaaataaaaattactgatagtaccaagtgctgatgaggaatgttaaatggcatagccaatttggaaaatagtttggcagtttcctataaacatacacacaccataggacccagcaatctctttcatcagtgtttatcttagaaaaatgaaaagttatgttcacacaaaaacctgtacatgaatgtttatagcagctttatactgtaccggtcaacactggaaacaacccaaatgtcctacaactgatgaatacaaaaacaaactgtgggccatctatactatagaatactgctcaaaaattaaatggaattaactggttcatgtaacatcttggatggatctcaaaagagttatgcatagtgaaagaggccagtctcaaaaggttgcatattgtatgattccatttatataatattattgatgtggcaaaatcataatgctgcatagatctatgattgccaggagttaggattgggggtaggatatgatcattaaggtgtaactcaagggagtttctttgtggtgataaaacagttctgtatactgactggtgatggttacaccaatcatagaacgatatacacatgcacatacccccaaaagaagtccacacaaaatctggtgaaatccaaataatgtattgtactgttgtgatacacattattattgtattgtatgtaacaatgtcagtttcttacttttgacaacgttctatggttatgcaagatattatcattaggaaaggctgaatgaggggtacatgaaaattctctgtactatatatggaattacttttgcatctaaaactatttcaaagtaagagttataattttaaaaaatcagttgtaagaaattttaaaaaatgttctagcctcaagcctgtctgacttcaaagccagtgtgattaaaccactacaccacatggtaaagatcccttagaaaaatgcctatgtcagcaggcacaaataagggacactcctagctattcaaaattatttttgtctccttaaaccctaaaataaaaaagcacaaaacaagaaatggctaactgagataactataacatttgaggtgggatgattttaatagaccttatataccattttaactcttttaggttaaatcccacttcgttgttcagtgatctcaaaatgtgttatgaattctttttggtagattttcacatcagtatttcaaatcaccttactctagatgtttttctcttgggtgttctttttgttaatatttttaacttcacaaagctcttttctatcattttagtcagttaattgaaagcaaagcttaaaggaaaccaacatgtttaaaataaactttttagggttggagactacatgctttttgttatttttcttgctctgatatctcattagtgttattacattcctgaaatacctaaaatggttaaaagcatgaaaagcacaagtattgaaagaccttaggagactgcattttgaagccctcaaaaatgtgaaccgggaaatacataaaacaactttgtttgttggggttaaggtcatgggaaatacatctgtttgcatttgtggagtatactgtcgtagaaaactacgccgcatgaagcaatggagcaaaaagcacagcagcaatatgcggttacatcatctgctaagcatgtatattacaaattacttgaaagcaataatcatgatattctggatcccaccaaaatgttatgatttaaacatccacaacaaaggctgtgcccagaagcctttgttctgagcagggtttatttgaagaaaatggaatgtgattgtaataagaagcctgggctggctgtgtctctccaactcattaggctgcatgaggtggtagggtgaagggagatgggctggggagaggctggtgagttccacacaacaccctggggcttcacaagggaagaggaatgacaggtgcagaggagatatatgaagttctccatcagatagctcctgcagagttggagtcctagccttcagggcagaactctcaggaggtgcactctatcatagtcaaaaattccagtgatacattgttcatgagaaaaatcagacaaggcaattacaggaaagagcaggaagccacctccgtcttccaatcagattttcaatatttaaccatcacttcctaagtacagttgggctctctgaattatgcagcatccacaagactgtcggagaagatttgttcctaataatggatttttgcatcacaaatgaatagagttctttgtctttatattcatctctcttctctgtggttacttcttcctaatttgcgtttttacctgtcactttgcctataagaaatgtgaaaaatatgaagaatcctcttttattatcatggcctatgagtgcccaaactgtttgaccctatatgaattaaatacacttttttggatattttgttctccctgtatgtagggtttcaaatgggtgcaaataatatacagttaaatctaaatgtgctctttccaccagaagaataaagtctgttaccagctgaagatgagaaagtggaaataggcatagctgagataaattaaaaaaaaatgggagccttgggcatttttcataacagccctggagttagtggttggctgggaggagggactgtcctgtgtgtggctttgaagttatgtggaagtcattcacatttagcacattattctcaggctatgggggtaagggtgatgctcatatctcgtagagagagaatgttcacttactgaaagcctgcctggactttgtccttttccaggcaccatttaactattaggagttctagatcatacttggcattaaggatgtcataacaaactccactttctaaggtttctgatccttaaatataatcaagagaagtaatggtttattttcatctgcatgcattctcatgcctttgttgagactatgccagggaaaagcaagaacatccatttaatgggaagtgtcatatcttcctccgacccaccctcccttcctttcttcattccttccttcagcagaggttttcaagtgcttgccatgtgccagataggcactgtgctaggctctggggaaatcacaactaacgacatgcagcctgtgtttcagggatgattttacattccagtatggaatacagaaaagtgaacaggcaattgcaactcagtgtaataagtagaatacatcttctgattataattataacaataatagggatgtatttcttaggtcattctctcaactatcccttgagctaggtagtaattttattcctgttttactgaaaaagcttgaggcttggtcaattttgcaagttcataaacttagcaagtgtaaagctggaatttgaatcctggcctgtggaatttgaatcctgtttgtgcagtcctagaactcaagcacttaactttgacactaattggttgctatgggaaaacatggtggtgggaatgtacatctggcatggtcttggaagtcccagagggtggttacagaaggcttcttagaggaagttacaactaatctgaggattgaagagagaataatagtgaaaagaataaggcatgaagaataagctatatttaggttggaaacctggccattcctacctcttagcttgggtaaaatgtttaacttctcagcctcaactgccttatctatttaaaaaaatgaggctaatattatccctatttcagagttgttagaatgaaatgagatagcatagcatatgtgaaagttttagcataaggcttggcattaggaagacacccagtaaatgtttattttctacacttttccaagcaataatagcgttctgcattttaccgtgtgtaccatggaatgtgtgatctgccttaacccaaaagccatgggataattcagatagtttaaaatgagagtttagattatttattctaatttatattagtactaaccctaatattgccttggttattttgggtatttcacttatctacttgcctaacaactcattcagctattactgggtgtattttagaataaacattcctggaggaaaaagatgtttggctatttctcagaaataacggagcttgaaaggagcatttatcaaaacaactaaaaaaaaatctctgtgactggttgctggattaaaggaagaagacatgaatctacaacataataaattactaattgtttctcaagttcatggccatttgtaacatttaaaaataattatgtacattatgatagaattactttcagatgtaagaaacccctcttctccacaccatttaattaaacattaggtactgttgaaacaaatggatggaattggtttaggataaatggttgtaccactgttactgcaagatgaatactcataagcaagattcataatctttctcattaaatctcttttcctcttatgtgtcatatctcagttcatatctcagttaatattatcactatcctctaaattactcaggctaaaaactttgacttatttttgtcttctctttatatcaaaccagctgttaaatgtggtaggcagaattctaagatggtccccaagattcctgcaacctggtttaacactttctatataatttcttccctttaagcgtaggtgggacctatgaatatgatgatgtcactttagcgattaggttacattatatggcaaaggcaaagggatttcacagatggaattaaggtccctagtcacttgattttgacttaatcaaagtggattatcctaggtgggcctgacctaatcagatgagccctttaaaacagggatttagccttcctgagtccagacatttggagtagcagatgtactcttgctggttctgaagaaataaactgtaatgtgatcagaagaaagagcatgcggtgagaatatgagagtgacctctaggagctaagaggtggtttccagccagtaagtaccaagaaaaatggggaagtcagtcatataactacaaaaaaaaatgaattctgccaacaacccaattaagcttggaagcagattcttccctagtcaaaccttcagataggaatgtaacccaactgaaacctttactgcagccttgtgagacctgagcagacacctagctaagccacacctgaactcaacccacaaactgtgagatagcaaatgtatgttgctttaactgactacacttgcattagcttgctatgcagcatagaaaactaacacattaagttctcttcattctccccttccagtgtctttatctatccccttttctctattactatggccctcatttatgtcttcatgtctctcacctgaactaataactttctaactagtcttgtcattttcaatttttcacttctccaggaaatccactgcccctatatccactgtattctgtcttatagaatgtagttttgattatatctccccctttaaaaattctcattgctcccagttttctccactgtcaagggagtatagctttgtcatttgggctacgagtttttgatttagagagctatggatttgaatttaaattccaacacttaactaactttatgaacatgggcagtgaataaacatctttaagcctcagtttgtaaagcagagattataattttcccttccttatagggttattgtgagaattaaatgagataatgcatgtaaagattatgttacatagtatgtgctcaataaatcatagctattattgtggttattatgtaattaaattcaaactcttattctggtactcaaagttactaatgatcctcaatagctttttcagccacatctcgtacatctttatgcaaatcttgtggatcagccatgacaacctatcaaaaaacttgaagtccttggttgcatattatgcaatactttttttggtctattttcttccctcaaattagagtccctcccaaccctccactctacacttatcaaaattttgttactcttttgaggcctcccctctaactagggctagctttcagctagcacctgtaagtattcctttactgagtacttacaacccaagtgtgttctgctttgttggaggcccattctgatttgtggtgccatataacttgttggtttttctatcaaccctacctacaaccttccttttcttttatcttttgactcagaatttatctttgtgttcctgcagcagttttcttgcccctatgcttagtatgtcaaactatgttttgaactccaacctgctcacatagttgggtacctccccatataaaaaagggatcattttttatattcccagttcgcttggcacataataagtactcaaaaccttgttggatgattaagaattagtttcactgacctccttgtcagtcctaagaatgatggagcaaatttttgtaatggataataactactaatggttgactggctttagaaacatcttatttggcttaaataattaaatattctacataagaatgcatcaaagtaaactatgtgtgctttataaagcacaataaaatccatgaagaatctagatggccaatttatttaaataaacatatctctatctttatatatgcttctttgacggaataatttcagatcttcattgttccaacaaatctttttattccaaacaattgcatttattatcctgcaaaaagtcttgagataccacctagtgtagaggtctggagacctgaatccatgtaaagtaggaactgtgtcttccctttctctctgttaacatacgcctgttgatacatacactctgcctggcttcttcttccatagccagttgaggaccattcttgctggaaaatgtagacctcaaatagaaattatgcagccttgccttcttttcatctggtaattatgcatagatgttcccaagaagtatttgaatgctgaggaaatcattttgtcttgagaaatataatcttttactttctttttctctccccgtctccctccctccctccctgtccccctcctttctcactctctttccttttgaggcagggtctcactctgtcacgcaggctggagtgcagtggtgcgatctcagcttactgcagccttggcctcttgggctcaaagcgatccttccacctcagcctccatagtagctgcaactacaggcacacaccaccaagcccagctaatttttatgttatttatagagacagagttttgccatgttacccatgctggtctcgaactcctggactccggtaatacacctgcctcagcctcccaaagtacaggtgtgagccactgtgcccggctcactgtacaggattacaggtgtgagccactgtgcccggccaacctcatttctttctgagcaatagctttttaaaactttattcttagaagataataatagcaatgatatccttttgtgttattagttgtatcctcctttatttcactttatatttattttaaatcggagctaggcagactagtttctttcatgaatttcttacttctttcttagaattttagagtccatgaaatactgtaaataatgtgtgtgtgtgtgtgtgtgtgtgtgtgtgtgtgtgtgtgtctttaaaaatgttcactttttgttaaactcagtgctaggtattttatgtgcattttcttagttaatattcccaacaaacctacatggtatatactattacttccttcatttttccaagtgaaaacaacaagcttaggttaagtgattttcctaggcactttcctttgctttacaaaggaaaactctgagacttaaagaggttaaatatcttgctcaatgtcacacaactggtaagtctcgcacctgggattcaaacttatatgtttcttgagtctatagtctgagcttttaccctctgtgctatagctccttcctttcctttgaagttcttgacatctgctttcttaacatcttcagcacatgccagcctctgccctatattttctttcttattacaaattccaagatgacatggtaaccattcagttcttccttgtaagacagaaattggtccaaaaatagcagtctctttgctgtatctgctatcatttcagagatgatattgtcagtaaggtaagtaaaacagtttttaactactttactttgagctgcaaagacttctagtaaatgttgtgagagtttcccatgaacatatagcttacctctgtgccagttttgtcatagaagcagtccattatatttagtacatgaatgtccccaagactgtgcaggaaatcagatccacacatattgaatcgtagacttaggcattataatggaggactctgtttccagaagaataaagaatccttaattataccacaacttttagaaaagacaaaagttgacaggacatagtggttgacatctgtaatccaagcactttgggaggctgagatgagaggattggttaagcccagaagttcgagaccagcctgatcaatggtaagaccctatctctacaaaaaaaagcaaatgggcatggaggtgcattcctgtagtctcagctacttgggaggctgaggtgggaggattgcttgagcctgggaggttgaagctgcagtgagctatgattgcaccactgcactccagcctggatgacagagtgaaagaaaagataaaataaaagttgatgatgttctactttttaattcaatttctttaatattagtttgttcctttataaccaagcatcagtttggcgtcttgaccccaatgacctcagttgatggcaaaggctctgctatttttgttttcagacaggatttcactctgtcacttatgctggagtgcagtggtatgatcacagctcactgcaggcttgacctcctgggttcaagtgatcctcctacctcaccttccagggtaactgggactacaggcatgtgccaccaccccaggctaatttttaattttttgcagaaacagggtctcactatgttgcccaggctgggatgggctacttttgacatacctaatgacctcaatcttggttttaattgtaataagtttaggaaaatatattctttattagtagcattaatatgttcacccttttattccacactcatattttagaaaataactacagagatataatagatactcataattgcatatacactgtattaaggtcaaaggtggctacattgttaaaactaagctgttttggccaaccaatggccaatttcacccaatgatagcttgaaacatttttcaaaagttcatggatagcttaatacttaggtggtgggttcacaggtgcagtaaaccaccatggcacaagtttacctgtgtaacaaacccacacatcctgcgcatgtatcctggaacttaaattaaaaattttaaaaagttcatggatgaatgtccaaattcaagtattaaagtaaatttaggagtataaatatgtcattatgaaaactcagggctgccagtatattttaaaaatgaattaattatctgtaatttttatttgattgaataggctgtagcattcttctataatgattaactctgtttctctctcactttgtcttaacccaaatggtcttcactatgctcctggtgacaagtttaagaattcccattaagattatatcttatgtatcactgggctttcccccttccttttatatttaatccattcatttccagaagaaattctctttagttgtcatattcttcactggaattataccaaatattaataataactcatttattattgttagcatcaatggtagagttaccatataatttcttacctacatcagaaaatgtgtgagagtgaaagggaacactattaattgttactttcttatattaaaatatcaaattcacccttgttatctgtcttaaggtctttatttgcaacaaacataaatccactgaaattaatttaagtaaatgaagaatttattggaagggaatggggatggcttattaaaccctaggataagaaatgaagctgagacttttgaggatctgaacccagcacatggaaagccaagagcttgacgtgttgctctgcttttgaggggtcatagattactaacttagtgattaagtccatgccttttttaggagccataagtaatgaaccattctcagaatgaatagatcaaggatgccatgaggtgtctttccattaccattatatacctatttattgctgtcgtagttcatttttcacgttttcacaaacacccgtaatttgccacgtaagcatgctgccatgtacataatagaagatgagtaaacatttgttgaatgaataagtattataactcacttttagaatgctgtcacattccttcttttacatgaagatgtgacagtgacatttgttcccccattgactgattatgcacatcagtattgccctgggcaggattgatgtgactgatctgacactttatctttgtgttccttgcagactttaattttccacctaacacatgaaaatcttagaagatcaaataacactagtccaggataattatcttcaaaaaccatttgattggttttctttgaaagtcaggcttactgacttgaaaaaaaattttttttaagtaattgagcagtttgaattaattaaaagtctgaattaacaaaatctgccagaatagacttcatttaattttttttttgtagaaattacaaaagtgccaggaatttaattctctgagtgacatccttgtggtgagattaggtcaataaaaagctggagaaaacagccagaagtttcttcgcacaattgttctataccagaccctccctggctcctgtctggggtttttccctccccttattgttcctcatcagaattggtccctgggaccctggtctttggatctgctttcctcccagcgtcttagcaagtcatttctgattcccacccaaactcttctgctcccattaccaacaattccaactggatttctagcatctatctttaaatatctcttgacatccctttgtgaaaacattaattgttgcctctactgcatgatttagctccgcctcccacaccacagactaagactgattaccaattatgcactgctggtaaagatttggttcctaattgtgaggatacattgtttttgtttgttcgtttgtttgtttgttttttgttgttgtggatgttgttgagatggagtctcgctctattgcccaggctggagtgcagcgacacaatctcggctcactgcaacctctgcctcccgggttcaagcgattatcctgcctcagcctcccaagtagctgggactacaggcgcacgccgcaacacctggctaatttttgtatttttagtagagatgaggttttgccatgttggccaggctgggcttgaactcccgatctcaggttatctgcccgcctctgcctcccaaagtgctgagattacaggcgtcagccactgcacccggcctcattgttcatcgttaatatatttccaagcatggatctttgtatctgctctaatgaagagatacaactcgtttattattgttagcatcaaaagtagagttaccatataatttcttacctacatcagaaaatatgtaagagtgaaagggaacactattaataattactctggaataacaggtgcacatcaggattgccctgggcaaactgagactattgtcaccctaatcattactgattatctggcttctctaggaaaatattttgtttctgtattgagattcatttatttttcttcatgtgtttaaatctctttttgagtttgctaatttctggaaataagcagttcagtaagtagattagagatcagtcttattgaaatgctctttagtcctttttgtccgacatctcagcgaggctgcggtgtctgctgctgctgtccgagcttcacaatgccacccaaggatgacaagaagaaggatgctggaaagtcggccaagaaagacaaagacccagttaacaaatccgggggcaaggccaaaaagaagaagtggtccaaaggcaaagttcgggacaagctcaataacttagtcttgtttgacaaagctacctatgacaaactctgtaaggaagttcccaattataaacttataaccccagctgtggtctctgagagactgaagattcgaggctccctggccagggcagcccttcaggagctccttagtaaaggacttatcaaactggtttcaaagcacagagctaaagtaatttacaccagaaataccaagggcggagatgctgcagctgctggtgaagatgcatgaataggtccaaccaactgtacatttggaaaaataaaactttattaaaaaaaaaaaaggaaagaaatgctctttaaaagcgaacaaacgccatgccaaaaccttagactttcaaaactaaggaacatttgacattttacaaatacttgacatggacacttttcttttaaaagtaaggaattgattaccttgtcagaagaagttacctacttttttctttattcacaaataagtactagtttatgtacatcaggatggcattaagtctttaggtttttttttttttagaagcccctgtgacgtagaccagtatggaccataattcaaagttctgtaatagaaacatgcatccaaaattgactaagtagttttgcctcttttatgtagcaatttctaaatttttaagttttggataattctttatatatacattatatacatatatatttatagaatatctgaattgataattacctcacaaaccatctaatttggtggttttcccccttggctgcatatctgaatatttggagagctttaaaaaaatactgtcttttctatctccagaaattctaatttaagtggtctgggatggaacccaggcatagacgttaaaaaaaatgcctcaggtgattctcatgagcagtcagggctgaggcgtctctgatttaattcaaccctggtgtttcacatctgagaaaattgaggcccctcttacttagctgttactgtgggttaacaatctaaatatctctgtgaatctctagatgtttttaaaagggctctgcaaatgtgacatcaccttctttatttagaactgatcataatttttatggcttccaacagatgtcttggtttcttgaattatcctttcacgtcatggggcttctaaggcacttgctgccaaaggagccggaaggtatgcctctttttctgttctccaggtagtagagcatattttagctttttatttcttgccagtattcttgcttcactttcttcatttatcttttgtgcactaaagtttgtcttctaacactttagattatgtggattacatgcctgaagatgtcaaacttcaaaaatgcttctcttttgcctttatatttgaatgatagtttagctcagggatcagcaaattatggcccaagggccaaatgcaataagctgcctgtctttataaagttttattagaacacaaccatgccctttgatttatatgttgtccacagctgctttcaggcacaacagcagaattgagtagctgtgacagagattgtacgagctgaaaatatttaccatctggtcctttactttaaaagttttctaactgattagctaattaaactctctggactgcaagaaatttgtaagcattgcgcctctatcttctaaaggtaaataaagctgtagagataccagaggtcaacttgattcccacctacacttccattacctacattaatgacttggtctttttgcatgattaaagggttttttcctttatctctgaaatctcataacttttaggctaatcttagtgtcactcattcttcatcagtttttcttatcacactgtacatttgattcttttttgttatttttgaatgttgttttgaacacctataatccaaggatgccagttatctacattttcatttaactttgatgggcttgtatagttctatctttttgcatatatattcctattgcttacttttttagccccgtattctgtgtatcttatagtattttcagtaatgcctattcatcttttccctggctcttgtatctctgctttaagattgttaaaaattcttaaaatatatgacaatatgcttgatcataattttgtctgcctggtgacaacatttttttttttaaaaaaacaaatgttccttcttcatctgccatttgttttttctgtttccttcctcctttttttcttgcaatatctttacatagtttgtatactggtttctttttaatcactgtttatctttcaatgagataagttctttctgactatttgcaggagataggacagggttatgttttgagctgtaaagaattttctatggttcatagttgtggcataaactactaattgtatctttcaacactcatttctcctttcttctaaaacaatagaaaccaggttctattcattgtcactgtgctcagctatagccctaaaattctcaactttccttgcagggggttatagccatgtgactgatcttcgtccaagaatatgtaaagaaaaagtgttgagttggcttttaggtaagtaccttaaatgtgagagggaaatggagccttcttcctcatctctgcagcctagaatatggatttaatgaccagagctccagaagccatctaaaaccatgaggcgtgcttgaagatggaagccatgtacggagggtaacagagcagaaagttaggagcctggcttcctgatgacaccatgaagccactatacaaatcttattcctcgaaattttaaaacaaaaaatagcttttttgagatataacttatatatacagttcaccccttgaaagtgtacaatccaatggtttttagtttgttcacagagttgtgcaaccatcaccacaatcaattttagaacatttgaaattcttttaaatgagagaaaaataatcatgttaaagttttttgggtttttttgatacgtagttgaacttcatcttaactgatatggtaataaagctttttataacacagagttgtgttagtgtgagtacgtgggtatgcaagagaatcgctttgcctttattttttcactgcttaccaaaagtgccagcttggagttcaggatcttcctctatcctgcctcatctcaccaataacttgcttcctgttgaaatgtcatgtctgtgcggttctgctttcagtcccagcttccctacttctctaaggtgccaaacaagcaccaaagaagtttcccctctaagcctgcatgttccagcaccattgtttagacaaggaattggtggttgctgtcccacttcttaggagagcacatgctctgcagggttgtctgggctctgcattttccggtgggtcctggctttgtcttcctcatgggccaatttaatgggctcttcccactgggctcttcccagtagactctacattaggcagccccttcctcatagcatgcttcagatttacagtcatttcctagttttctcaaggatggaacttgcattctgttttccttcttctgcttgttgcagtgtgactttggagaagagaaaggagacagatgtttttactccaccattttaaaaccagaagtctccttgcttaattttaaaataactcttttttatttatttagcagaggatatatggtcaccaatcagtggtaactactattaacttttgggagaatatttttccaaattttctctctgtcaatctctctctctctctctctctctctctctctgtctctatctatctatattaacctatttaatttctggaaaacatgatatagaattattaaatagtctacaactttgtttttaattggcctttggcatctcagtgtatgaatataccgtgagttattaaccagtcccctagtttgggccacaggccacagggttgaagagcattacctcaactctagtggtgaggttgacatatgagctctaggctctcatatgaactctaggcacaaaaggccacagactttcaaggactgggatacctgctctgctgggggttcccaacatcataagacccaatggccctctctacttcccattgaagtcttttaaaaaatacttttaaaattttaaaccaattttagacttatgaaatagtaaaagtagtacagaattccttatattccttaccccatgttccttaaagttaacatcttacataagcctaataaaatgatcaggaacggggtattaacattggtacaatactggcaactaaacagaagaccttatttgaatttcatcaatgtttccattaatgcctgttttctgtgctaggatgctaacagtgatcccagattgcatttatttatttctccttagtttctttcagtctataagtctataacagttcctcagtctttccttttttttttttttgtgacattcacacttttaataagtaccagtcagttaatttgtagaatgtcattcaatttggaatgttttctcatgattggattgaggctgtgtgtttttggcaagagcactacaaaaatacacctatatctttctcaaggtatcattatccaggagtaatgatcttgatatgtcttattgctggaggactttatcttgatcagttgttttaagtcggtgtctgatcagttaggccaaattaatgttttttagccacacagtggcctatcgagacactatctcccatatttacttaggttagttacccatccatttcagtgtggttatgttattcatttgtgtatgattaggttcatttgttagtgtttctactcggttctgggttctcctttccttgcatcctggttgattttaagtttttgtttattttgaggatatgtgaagggtttgtgaaactgtggttctaagagtcagagctatacaaaaatagtacttggagaagtgtgactccctcctcatccctaaaactctgtttccattcacctcttttcttctctttttccacttgcttccttaggtaaccacactactaagcttctatttatccttcttttagatcttttgcacaaaagagcagacaccttggtattttctatcttcttcttatgtcctagagatactctttcgggccttgcctttttcacttaacagtatgtcctggaaatcatgccatgcctgttcagagaccttcttcattctttttttaccactgcatagtatttcatggtgtggatgtatcatagtttattcaaccactttactatgtatgggcatttgggtcgcttccagtattgtacagctacaaacaaagctgcaatgaataaccttgcatatatgtattaatgcgtagttgaaagtatatctttggggtagattcctagaagtgggattgctgttgaaaggtaaaaatgtatgtagttttgttaggtattgccaaatttatttccagaagggttgtaccatttgtataattggtacataaaacccataaaaatgactttttcctcacagcatcaccaacagaatgtgtcgtcaagtttttaaactttaaccagtctggtgagaaatgatacttactgtgttttaatttgtatttctctaattatgaatgaatttcagcattttcccatatatctgaaggccatttttaatgtccagtttttgtgaattgcccattcatgtcttttcccattttttatattcttaattttaattttttttttttgagacagaatttctctattgcccacgctggaatgccctggtgtgatcatggctcgtggcagcctccaactcctgggttcaagtgatcattttgcctcggcttccccagtagctggaactatagggacataccaccatgctctattattattattattttggtagtgatgggggtctcactattttgcccaggctggtcctgaattcctgggctcaagtgatcctccttccttggcctcccaaagtgctgggattataggtatgacccaccacgcctgtcctcctatttttttaaattgagttttcagtcttttgtgtctcagttattaagagttcttcatatgttaaaactattagccctttgtctgtggtatatgctgtaaatcttttctctcagttttatcagtcgcttttgactttctttgtggtgcttttgttatataaaatattttttattttcaagtagtaaaatttataaattttgttttttattgcctctgattttttttattttttattgccttgggattttgagtcatccttagaaaacttttccctacactgagattaaaaatgagtttactcatagtttcttctagtacttttacagttttatttttaaatatttagatccctaatttatttgaagtttattaatatggatgatgtgagagatggatctaattttgtctttctccaaatgactacccaggaccatttgtttaagagtgtccatctttactccagtgatttgagcttataaatgagaacatgatattttgttttctgttcctgcattaattctcttggaataatggcctccagccgcatccatgttgctgcaaaggacgtgatttcattccttttatgactgtatagtattctatggtatatatgtactatattttctttatctagttcagtgtggatggacacctagtttgattccatgtctttgcttttgtgaatagtgctgcgatgaacacacaagtgtatatgtctttttggtggaacaacctattttcttttggatatatacctagtaatggcattgctgagttgattggtggatctgttttaagttttttgaaaaatctcggccaggcaaagtggctgacgcctgtaatcccagcactttgggacactgaaggtaggcggatcacttgaggtcaggagttccagaccagaccagcctggtcaacatggcaaaatcccatctctacaaaaatacaaaaattagctgggtgtggtggcacatgtctgtaatcccagctactcaggaggctgaggcaggagaatcacttgaacccgggaggcggaggttgcagtgagccaagaccatgctactgcactccaccctgggcaaaagagtgagattccatatttaaaaaaaaatatcaaaactgctttccacagtggctgaactaatttacattctcatcaacagtgtataagcattcccttttctccacagccctgccagcatttgttttttgactttttaatgattgccattttgactgctatgacatggtatctcattgtggttttgatttgcattatctctgatgattactgatgtggagcattttcccgtttatttgttggccacttatatgtcttctttttagaagtgtccatgtcttttgcccactttttcatgagttttttttttcttgttgagttttttaggtcccttatagattctggatattaggcatttgttggatgcatagtttgtcgtattttctcccattatgtaggttatctctgtactctgttgatagtttcttttgctttgcagaagctctttagtttaattaggtcctacttgtcaacttttgtttttgttgcaattgcttttgaggacttagtcataaattctttcccaacactgatgtccagaatggtgttttctaggttttctcctaggattcttagagtttgaggtcttacatttaaatctttaattcattttaatttttgtaaatggtaaaaggtagcagactggtttcattcttctgcatatggctagctagctataccaggaccatttattgaacaggaagtcctttctccattgcttatttttgttgattttgttgaagatcagatggctgtaggtgtgcagctttatttctgggttctctattctgtttcattggtctatgtgtctgtttttgtaccagtacaatgctgctttggttaccgtagccttatagtcaggtaatgtacctttgaagtcaggtaatgtgatgcctctggctttattcttttttgcttaggattgctttggctatttgggctcttttctggttccacgtgaattttagaatagtttttttctaatactgtgaaaaatgacattggtagtttgataggaataagtgctgaatctgcagatggctttgagctgtatggccgttttaacaatattaattcttccaatccatgaggttggaatgtttttccatttgtttgtgtaatctttgatttctttcagcagtgagaaaactgacatctttatactgttcacttacctaaaccaagaacattttatttgattttattttagtttttctggagtaatttacaattttttgtggagtcttttggttgatctagaactaggaaaagactgtcctaggccataagtggtcaggaaagaaaaaatacactagaaaatgtatcaaagatctggtaaatatgcttacattgtctcaaagttcttcacaaccactctgtgaagcaggcattgttagctacattttacaaatggttacaatgagccttaagtattaaataaatagaaagtggtcaatagtgaaggcaggatataaatttatgtgcctgtatgtcaccactccatatattatttgcaagagcatgccaggtaatggaacatctagggaaggaagcattgataataaagtttaaaatcttcagaatgaggctagaatggtggttagcttagatccagtattagaacccagtgttgagccttgtatttagttctgcacacttcacttttagagggacatggctaggcttggatagcaacaagatttcaccctcttgttaacactacttgattgatcagagctagagagctgtgctgaaattgattacaagacttcatctgggcatattagtaaagtacatagggatcaatatgcaatgttttccatgagtatgaagatagggaaatggggtgtgtcagctatctgtcagtcaaccttgggctatacaacaagtccaaagggaagtgacaaagatggggtgggaactttataagcatgccatggaatggaaggtttgaaatccaggattgggatggaagaagttttgctagttttttgttgttgttgttgttgttgttgtttttaacgttcgaaaaaaaagtcatgtcaactttttatgtgtgattcctgtggttagaacaatgatactgtgtagagtgccaactcaggttccatagaaggaagaactcttctaataatcagagttgcctaaatatgggggaaaatggcctggcagcgatcatgcacttgctgacttttcagtgtgacatagacattgagagttcaggctttgggatcataagatcatgggttacttgtgttgaatatattacagaagtcaaatccctccattatatatactcctaaccctctagagcatgatgtgggacttattttacatttatttgtgtgatcctttgcttaaaatacatctttctcagcacatgagtactctaatgatggcagtgactgttttgctcatagtacctggcacagaataaatgctcaataaatgtttgctgaatgaatgaatgaatgaatgtaggtttgtcactctcagttgttccctcctgggagctactatcaagcttgtgcttgagtcacttgctttgatgtgccaaaatatgttaaccaataggggccccaagagacacagaagtcacagaatggtgacactcaggctttgtgtccccgatgccagtttcactcatggatcaagggagggatgaggcaggggaggagggatgttcagaagataagtgagggaggggtggtaatctcccgatagttgttctttcagactttgcacttcccttttagaaacctcatcatacttctattagttgttcaatattgtcttttctatcagatcctccctgttcaatttctaatttttctgttatgcagtatgccccatgagggtagggaccatgttttccttaattatttccgtaacccgagcacctagaacagtgcctggtgtatagtaagtactcaataaatttttgtgagatgaataaatacataaatgaaatgtggtctagaatctgtgtgcccaataaagtagtgtatgagatattaggacatgcaatacacagtctctgttttcaagttgcttgtggcctaggtagatacttagtaatatgcagacaaaactctaatacacaaagaaaaaaggcactgaagcagaaattaagtttgaatctttgcctgcagtgatttgcctgtgaataggatttcagtgaccaataaaaattaccctgctcctttatggtgagttgtcataaagtatatgtgcccctgccttttcttgtatcttctagtagcaaaagaacacaaggctgcagcttaaaagtccagaatgtagtctcttcagtttccctcaactgtgacaagttagtggggagcaataattcaaaaggatctttctagaggtaatcttgcaaaattcttagaaaaatctaaattgcaaagtgaatgtacaagggggtaatggtgcaagcatcttcagcccaagatgcttcaaaaatactgagtcatcaccaaggccagaaaaatagaccttatcttatataaccacacactgaacttaaaatatgtaaagggaaattaaaaattttttgcatattacacaaaacaagtccctgagaagccagagaatgatatcttggctaaaggagtatttgatgttagttgaactgtaaatttttaggaatttaatattgattacagttatatgcaaagaggacatgaggaatgtgatgggctgccatcagccaggagagactgttgtacttggaaccataagaaacatgtgtgagtggtcagggtgctgaaagaataggactgaaatgggctgtcaagaatgcatgaatgattaatgtgtaagtgcagtgatgtggattggaatatattgcaaatttgattgagtgggaaaagtgggaggggagacttagtgcctctaaatgtatgtgggattgttttaatatcatgcattaatagatactagccagatccattaagaggttgtcaccaagactcatcaatttttcttaccttatatttcttgtattcactcttcatttcctctgccttttctctagtttggaccacacatttcatgtcttggctatttcaatagttttccagttaatcaacatgactagtattccccaaattgggttaacaacatctaaaaccaccaggtcagtatttctaaaacaacacttttctatcttaatccttcattgtccttctccccaaccccccaatattacccagaatagtgggtttcaaactgtgtcctacgatcatacatagaatgctccagaaagagagattatgtttgtttttactcaacgaatatctttctatcacttagcacaatgtggaggcagaaatattcaatgaatatttgttgaatgagtgaacgaggtggctcattggttgctgggaaatggaattagagaaagacaagaaattggattctggggctcctacttcctatcaaatcagcagctccattattatctgcttattatgtaggtgttttgagtaagttttgtctgaaaaagagtcctgttgctctaagtatttgaaagccaattaactaaaaatattttaactcgtacacctaacatacaaatcctaaattaatctttcaaaggaacctgctagtactccccaaaatacagagaatataatgtggtttgttgttgttgttgttgttgcttctgctgttttttttttgttaaatgtttttttgtccagcaatcctctccaaaaccccatgggtctatggggctgccatatttgttagtatatgatcccattcctgagaaataggttttgacccaggcctggcctgttataatgtcttgacatccaggcctgaatttgtttgtgggtagatacctgaccccagctgggccatttgttatcctttcctgggattttaaacagtttttatcagaaaccaagcaataacaatctgatcatttctgtggctaacgtttttcccccggtggctaacattaagagaaactcttcatgatcagatttcccagtgtttggagaagcaaactagagtggaagagtcagaagcaaagatccagaaagatggagatatgagagacagagagagcatcctactggtatttgagttcatttccaaggctgtcgaaggttgggttttactgaaacagtccctgtgatagaatttgtggtgtaggatatttattagggaccagcacttatgggaaggaggaagagaaagcaagattgggaagaggaagaaactgaactcaatgcaagtctgacaactccacagagaattattgagcataataagtccattgagcataaatggcccattgaaattgtgctgcatgagctgagatgttctggcctttatacttccacagtgattagtcactggatatgggctacccagggaagggcaagctcttggacaaggcaactctcagcatctgaggcaaaccctgaagtagatgatagatgaaggctgtctactgaccacatggccagcatctgggaaaacatattgttctgtgaaagggtatctgagcggcacttctccatgtccaccatgtaggcccacctttaccctgccttcaacatgtttgatcttcaacttcttttaatgatgtgagatattccaatatgcttccaatacatttcctttttttttgttttttcgcattctttttttattatgattatacttaagttctgggatacatgtgcagaatgtgcaggtttgttacatagctatacatgtgccatggaggtttgctgcacccatcaacccatcatctatattaggtatttctcctaatgttatccctcccctagccccccacccccctcataggccatagtgtgtgatgttccccttcctgtgcccgtgtgttctcattgttcaactcccacttatgagtgagagcatgtggtgtctggttttctgttcctgtgttagtttgctgagaatgatggtttccagcttcatccatgtccctacaaaggacatgaactcatccttttttatggctgcatagtattgcatggtgtatatgcgccacattttctttatccaatctatcattgatgggcatttggattggttccaagtctttgctattgtgaacagtgctgtaataaacatacgtgtgcatgtgtctttatagtagaatgatttataatcctttgggtatgtacccagtaatgagattgctgggtcaaatggtatttctggttctagatgcttgaggaatcgccacactgtcttccacaatggttgaactaatttacactcccaccaacagtgtaaaagcattcctatttctgtacttcctctccagcatccgttgtttcctaaatttttaatgatcacccttctaactggtgtgagatggtatctcattgtggttttgatttgcatttttctaatgaccagtgatgatgagctttttttcatgtttgttggccgcataaatgtcttcttttgagaagtgtctgttcatatccttcaccgactttttgatggggttgtttgtttttttcttgtaaatttgtttatgttccttatagattctgtatattagcccttcatcatatggatagtttgcaaaaattttctcccattctgtaggttgcctgttcactctgatgatagtttcttttgttgtgccgaagctctttagtttaattagatctcatttgtcaattttggcttttgttgccgttgcttttggtgttttagtcatgaagtctttgcctatgcctatgtcctggatggtatacatttccattttttaaaaatcaaggtcaagttagattgttgtcacttgctatgaacatcctgactgatatccttcagccagccagattgccctccagaatactcttctatccttttggttttgaaatacgtgtgtgtgtgtgtgtgtgtgtgtgtgtgtgtgtgtgtgtgtgttattctctactgctaaggtctgaatgttggtgccttctccaaattcatatgttggaactggaaaaccagtgtgatagtattaagaggtgcagccttggccaggtgcagtggctcaagcctgtaatcccagcactttgagaggctgaggcaggtggatcacgaggtcaggagtttgagaccagcttgaccaacatggtgaaaccccatctctactaaaaatacaaaaattagcgggacatggtggtgggcgcctgtaatcccagcttcttaggaggctgaggcaggagaattgcttgaagccagaaggcggaggttgcagtgagctgagatcatgccactgcactccagcctgggcaacaagagcgagactccacctcaggaaaaaaaaaaaaaaaggtggggggaggtggagcctttgggaagtgaataaataaatcatgcagtttccaccctcatggatgagattagcactcttataaaacagccttcaatggactcccttgttccttctgccacatgaggacacaggtagaaggcgtagttcatgaagcagacgttgaatctgctgcaccatgaacttggacttcccaggctccagaactgtgagaaataaatttctgttgtttataaactgcccagtctaaggtgttttgttacagcatcctgaatggactaggacatctatacagtcattcgtgcgacaaatacttccagtgtacccaccatggatcaggcaagaatctaaaccctccctttcctaaagcttcagcccactgcctttcttcgcacatgactccttatgaagtctgctctcctttgaatgacaatagcactcacattcctcatcacctctaccattcgtccagcactactttgtcttccactggatggctggcctctggcagaactgttttttgtgacactgttttatgaaataatgggtctcaaatgaaggatggggtgagaaaaattccatgggactttgtcccaacctctaaggatgttgttcactacattgcagtgttctttctacaagaccctcaggagatatttcttttctatctcaatatcaataccacatgtgcttctgaataactgcttggtttttatctcactaccttgtgaactgtgcaactggctaaatttctcttttcacattggctgctggataactcaagccaaacttgcacacccttagcaaatgtgtaacatactatgtcagatgccagtaactgttgcctccaggtcattgagactgaggacgtgattgtttgtttaagtgtgttgatatggtttggctgtgtccccaccaaaatctcaccttgagttgtaataatcctcacatgtcaagcatggagccgggggggataactgaatcatgggggcactttcccccatactgttctcatggtagtaagtaagtctcagaagatctgacggttttatagaggggcattcccctgcacaagctcttttgcctgctgccatgtaagatgtccctttgctctctgactttgtcttctaccatgattgtctggcctccccagccatgtagaactgtgagtccattaaacctctttcctttataagttacccagttttggttatgtctttattagcagcatgagaacagaccaacacatggggtttcttaaaaatttaacctgggccaggcacagtggctcacgcctgtaatcccaggactttgggaggccgaggtgggtggatcacgaggtcaggagatcgagaccatcctggccaacatggtgaacccccatctctactaaaactacaaaaaaattagccaggcatggagacatatgactgtagtcccagctattctggaggctgaggcaggagaattgcttgaacccaggagctggaggttgctgtgagccaagattgcaccactgcactccagcctgggcgacagagtgagactccgtctcaaaaagaaaataaataaataaataaaataaattaacctgaatgcattgaggttgggcatagagtcttggttgcctcaaacatactcaccccctgttgtaaacatcacttgtcacttcatatatgtatgcacacgctggcccccttgaagttctttgattttattattcttcctctatagcttgcattaaaaaaatttttaagaataatatttttaatttaacccaccgtattcaaaatgttatcatatcaacttgcaatcaatgcagaaaaaaagtattaatgagatatttttcatttttttgtactaaacctttagagtccaatctgttttttattgttgtaaaacatatataacataaaattgaccttttaaccatttttaagtatacagtttactgaaattaagtacattcgcattgttgtgcaaccatcaccactatctaccagcagaactttttcatctttccaagagaaaactccataccattaaacaataactcctcatactcccctctccccagcccatggcaaccaccattctattttctgtctctatgaatttgacttctccaaatacctcatgtaagaggaattgtacaccatttgtccttttgcgtctagcttattttactcagcataatgtcctcaagattcgtcagcgttgtggcatgtgtaagaacctccttccttttaaggctgaataatatttgatttatatatattccatattccacgttttgtttatctattcatctacggtttccatttttatattagccaattttatgttgttgcccttgttttctctgtaaactgcctttaattattttatgagcagtgtgcagcttaaatacattcatagttttcatcttcaataagacaataagctccttaaaggtagtgtccaacacatgttttgcacaaaggggatgtttgacacgtgtgttcattggcacaagtaacactctgttctaacctataggtgaggtgaatgcagtggggagtcaggggatgcctgcaccttggcttggggtgatgtagaacacagaacatttgtgtccctgtgtccaagcctttggtaatcttatctatctgttctatgctcctgcatttacttttcttccccaatatctttttaatgatcattttagtaacagtactgtcaacatatattacactgaaaatgctgaaaggagtccctttgggaggaggcacacaggctgaaaaattgctcttcttattttcctctccttgctattccagcctcaactgctcttcttggtggagacaaccactatgggaccagagtagattaaaatataaggctgctttaatggtaaaaagtttcccagtattcaaattcagtgaaaaatgcccttaagctttaaaatatagagatataattcagtgatttttggggaaaacctttaaacagcaatctaaaaagaaaagtttggaaagaacctataatcagagcctggttgtcccaggaggtaaggttatatgggcatggtggcttcttctatggtataactaaagaacatgaaagtccttctgaacttacacccagcagaccaggagaattttcccttgtgtagtgacacttgattggcattcatgccaaagggctcttgtgaaatggttgcctgagcagagtgaggtggcgctatagtagcacatcaacactgattccccatgtgctccctgcactgtcagtccctaacaggcaggcataaagcctctgctggagccactgcagggatgggagctcaagaccactcatgcctaccctcacctgagtagcccactgtggtttgggacagccttgttgttagaaaaatctttgttttattgagaccaaaactttctctataaacatcacctttggcttaaaatttgccttaatcacatctaatcttttttttttttttttttttttaaagacagggtcttgcttcattgcccaagcaagcaagagtgcagtggtgcaatcatagctcactgcagcctcaaacacctgggctcaagtgatcctcccacctcagcctcccaagtagctggaactacagccatgggctaccatgcttcctggctaatttttaaattttttgtagagatgggaggtctcactgtgttgcccaggctggtcttgaactcctggccccaagtgatcctcccacctcagcctcccagttccataaaaaggagaactcaccaggagttgctgcacagttcatgttcacaggatgcacgttctttcctattcagcactaagaaagccattggctttaccactgaggtgaggcctgtgaacgagttagggtacagcccaatatatggcttccttttattttcttgttttaaaatggccatctgtagagtcttctggaagccaccatatgtctcctgtgttcttgacaacaaccatgaaaggtggggtaggctggctcctgttctgcagatggtgagatggcacatggggagatggtgttgtacagtgggaaatgcaggctgaagccaaacagacctgggttgaatgcaaggtccaccaagcatctgggtccacactccctgtctggccttggcctagtcatttaaactctccgagcccaggttcctcatctattaagtgggggaaaataatagtagctacagaacagggttgtaataacaatgaatgtataaagttgtatagccctaagcttaaagcttggcttgtgttattgttgttaataaactattctccacccactccctttcatttgagtaaatctgcagcccaagctttactcaaaagaaaatattttgcattatgggaaaaggggaatttttaaaaaatcccttctctatgatacctggagtctgttttatgaacctagaaactaaatattcttatcaacttggcaggtaaatgaaaacaaaattatgtcacaccaaactgaaaaggcgaatgcatctttttgcatctgactttaaaagctgtcaggtctaagccacctagatttcattctaatgaggattcagggccagcttgtgaatcgtgagtcatgtgcaggctctgaacccaacagttggtaagctgggcttcaacaaagaacttaattaaggagaaccaccctcttcccaccccccacttattaccaccctcaatccccacccacaaaccacaaagggatatgcaccttgcactaggtttttgaccttattatgcacagtgtaacatttattacttcactcagcactgctggatgaaaacagtcctctttcaatttacaaaaacgcactttacaggaaatgtaggagaaaggccagagtacagattaatgaatgctatcaaatacatccacctgaaagtgtcaccaattttgctgtgacacagttcctggaattgcctcagagatttaaacttgtggataccccagtattgtatccccaaagactttgaaagaagtgcaaaaaatatgttctgttcataaagcattgtcaaggttatttgcaagggggtttggtttgttttattcctagggcctccaagaaatttggcccccctgccttttccatttttttttgttcctttttggtttagccaacctggcctttttgtttcctgaaccagcaaaggtagccttgcctcaggatatttgcccttggtgttacttttggttagaaaatcctttggttgggggggttttttccccatacaggttttagccaaaaaaccccctccttagagaagcattttttcatcccttctatgaagtagcagccctcagcttttttttagaacatacttttttttttttttttgccttcattgtacagtcttcccttggtatctgtaagagatttgtcccagtacccctggaggatactaaaatcctaggatgctcaagtcctttatgtaaaatagcatagtatttgcatataacatacacacatcctcctgtatacttgacatcatctctagattacttataatacctaatacaatgcttacacatcatttcatttgcttgaattaaacatagcacttggcatgtggcaaattcaagttttgctttttggaactttgtggaacttttttttcccgaacatttttgacccgcaggcagttgaatccatgaatgcagaacccacgaatgtggagggccaagtgtatttaccactatgtctcagtgattttagttaatggaggtgacaacatggagaggtcaatgccattggaacaagacttattacttacatttcccaagagaaggggatatacgacaccacgcagggccacagagaaagcaccaggttttggtaggaggcagaagccagaaaggggagagtctaggccacggtctttatcagagattccatgggaaagtcaagacagggcagaataaatactttaggactggctagttttgataatttctgtgggctttgggctataaaggtggtctctaattgcctcatacgtggttccaggataatttagggcagggaaaatattagcttggtgtgtgagggttagataaagggggtagttggggatatagactctggataggttggttggcatgtgaaaggaatgcctttcataagagctcaatcctgagcttttaactatctctaagaattggctagtgttgcaggaaaagtctctttccagacaacaagatttttcaggtgtcaaaatgtcataagatatacaaaataaaaaaatatgattaatacaaactatatgaaataatctcatttatttttgtctgtctactttaacagaaggtaagccccatgaaggtagggaccgtgtccttattgttcatgaccatatggccagcacaaagtaggtgttcaataaatatttgttgcatgaataaggaaatacgagctcctagagtctgggactgtgtggtcttcacagttgtatctccctgttccaactccatccttattctttctctagcacagtgcagaatacatagtaactgtcatttaaaaagggttgttgaattaatttgaactgagaagggtaatataccattttaatttgtgtagtttaaaatagttttagcaaatgtattcatttgtcacagataaagtggatggcacaaaaaatcatacattttagtaagaagaaataagatcaaacagattcaaaacatatgctccttttaatcagggattagcaatagcatattcaaatatcaaggacaacacatcatggattatagtgacccgatctctgcataaaatagatatttaaattcacctttaaaaacaggagcacagccagacagggttgtatacagctgtagtccaagcttcttgagaggctgaggtgggaggattgcttgagcccaggagtttgagtcttgcctgggcaacacagcaagactctgcctctaaaataataaaaataaataagtaaataggaatgtaatataccaagatgttaaaagcattaatctctagacagcaggagaagtatctttttagttttccacattttccttattttttacaatgaatgtacatgacttttaaaataagaaaaaaaatcattcaaaagaaattagcactttggttatattttattctgacttcctcattagagtatgccagcagattaatagaactaacaaaggagcctaaattctgcaacatttttttctagctccttttttatttatttatgcctcagaagcaatgtgaattctcaaattatcctttattaaatctaatcagagttttgatggactccaacaaacgagagcacagcatgttagttaccatgtcatgcaagaacagaaaataacctggtagattctccatgtcccgctaccaatgtcagccctgccaacgatccttactgacgttcccaaaactgacattcccctttcattgatgtcactgaatcaggaagccgaaaagctgttgcaaaatgactgtttctattgcaaaggtttaaaactttagagattgaaaggttaaagttaaaaatatgtattttaatttgaacaacagatggccttggagtgactacaaggctgaattaactctcaagtctctatggctgtttgtggaaagaaaaaataaaaaagacaaccaaaacccttaaaaagcccacactggaacacacagctcaagtgctggtgacatcagcagaatctctctgttgaattagagtcccgaatttggcttcagagccatctgttagcctccagatagaataatcttctatgaaattatactgcatagtttcactaatgaacatttccaattgtcagggcctcagtctcatagctgtcccacctcttggagcctccatggctccctaagcccctgtgatacacggagggatcctacttgctaaagttcacaatggatctgtcctttgaaaagatgtgtcttatcttagattgagttctatgaaaacagtctttgagatggagagctgcatgcagaaggtttattagaaagtgctcttgggaaatacagctataaggaaatgaggaaggctgcattgtgcaaagggaaaagctgacctacaaggcagttctaactcaggccttgctgtcctgtggcgagctctgttgctgggaagggccgtcagagttgtcccagattgaatcacagaatcttgggtctttgcatcttcatatcagctgtcattggatatcagctgctccctgagaaaatatttagtaaatgattgctttattattattactattgtttgctctagactgaatgtttgtgtcccctcaaaattaatatgtcgaaacctaacccccaaggtgatggtattaggaggtggagctgtggggaactggttaggtcatgaacatagggccctcatgatggaattagtgcccttataaggtgctaataactctggtcaccctttcaccatgtgagaacacagcaaggtggcactgttgatgagccagaaggcaggccctcaccagacaccaccaaatctgccttgatcttggacagcccggcttccagagctgtgtgaaataaatttctgttgcttataaggtacccagtttataatattttgttatgagggtcaaatgggctaagatattattaatcccaaagtgagtggatccttctgctcaacaccaggcaccagttggggagctttggggccatttgtatgggtgatgaggaaggataaagggctgagtagaacacaagtcagatgtgcagtgctggaattaacagaaaggcaatgtcaccctggcatgcctatgcacatgtacggaatatcaaaatgtggggagaaggcagccaccctacccagcagcgatgaagtcctagagtctactggcttgggcatcttgctgctctaaccagaaagctccgcgtctgggctgctgccagagtgggtataagtagtccctttttaggcagaacattatctagattggattacatgcttgtaaactgatcagtgcatcttcatatgctgtcaagcatctgagttcaaacaattgaactattttaataagattagcaacttggccctttcctatagtttttctctctacaggattccattcagaatcctctggagaagagtgtcttagggaagtagtaggatttcaggatgccctgcatctgccttcctgaggcagatacagctaaaaaagaccttcatgtccactagaaccacctgtacaccccaaaatgtgccagagaaatgtgcccaaagtcaagggagtggtattgtggacaggaggtttaataggattaatatgtattcttggttggtaaaccttgcaatgagtgtgcttataactcacccatggattgagagccaatctctgcctccaaaggctagagtgtaaaaaatggccagatggccaataatgaggcagaatttcataataatataatgattaagggtttgaaataaaggttatggaattgcacagatctgcttttcaaatttcagttcctccacttactaattttgaaaacttgatgaagtgatttaacatctctaaatcttactagtttcctcctctttaaagtgggataacaatgcctacttgtggcaaatggacctaagccagtttgctcattcacaaatactagatccttcgaggattatgattgggttctttttagtagatggtaggtagatggtagatgttataatcgttgcaggtagaaggctttcagtttcctcctcaaaatttctctaccaggtgctacttgctacatgaaagcaagtctcaggccagattctcaaattcttccagataggtaggcacaaaaacagtcatctaactcattctgtaagtgtgacaaaatcccagctctctctgtaattctctattggttaataggacaatttttagaggtagaattcaacttaaatttctagtagattctaggtaacaccagcctctcttcagaatcctaaatctagggattcttttttgaagcaattgggctattttagtaaagggggtgtgtctgtatgatacttatagacagtgcagtgcctggaacacttttatttatttcaccaatgagaaatgatttctaacatttttatgctaatgaataaacctttggtgttgaccagaaatcatgatagctaaagaataaagtagttctgtgggaactctttctggaatactgtattctaatatagtctcacaaaagctagtcatttttggagagtgttttcctgattagaattctttgaatattaattgaccaccctaaggtggttttaattagggcaattaactagggtaattaactactttaagatgtggattaaaatacgtatgcaaacactctctcacagacaaactactgtctatgctgatatattttaaagttaaagaccacatagaatgtctcatagaattaaatgacataatcaagtggtaactgacagcctgccctgatttatgggaatgaatgatacttctttggtggccaccagaaatacattgacggtgggggagtttttgcaagggattggaattcttgagtcaacagctaaggggtgggtgtagagagctttagatgttaatgttaatgtgatattgatagatatcactagagggtaaactccataaggacaggaacatttcccctttatttccctgctgtatttcagtgtttagaacagtacctggtatattgtagttgctcaatagatagttgttgaatgaaggaatgaataaattttaaaaatctgatctgattcttttgaggatgttcaggagttagtgcagtgctaggcatagagtaaatgcctaatgaatgtttactaattagtatgaatgaatgaatgaatgaataagcaattgagtgaacaagtaaaagaatttcctaaaggatattgtcaaactagatcaatataatgctgcacagaaatttaatttatgctgtgtttatagcaactctagcgatgatattttagataagatggcctgagcatagtggcattataaccaaatgaatgtctctatctgaagaatacaggttaagagacccatattgaactgaagaaagggctctatagtagtcgttggaaggctcccttctaagctcatcagagtctccatgtagagattgccattttccacgttgtatattttgctttttatgaacagctcttaattttaattttcaaatctatcaacctttccctttttggtttgcacattttataccttgtttaagaaattctcttctagatcaaggttaaaaatatatacttctttattttttattaaagttttgaaaactttgtctctctcagaggtcatcaaaccatcaagaattgatattttgcatatagtataaggtaggaaaatacaatttcattttcccttatatggttggtcattatttaaatataattttatttagtccaataactacattttatcatttccatctaaatcttgactagaggcttttttgggaagtggaaagggcaggttgtacaagtcatgttaattttatcctcccaacttgtgtaaatgggagcctgtgcttagggatttggtgagaggagagatccttcctcccatactccctcctttccagctccaactgtctcaagtctgagacaggccatgactttcttctcattgcaagttcattaatcatctaaggaggatgtcaacctttgggttgtgggaaactttattctagaatctctgctttaccttctcattctgctttattccctcacatctcatgtctgccccaataaaaccaaggctttttgctaccaggagtaaggaattttagtactagattatttctccttattgttgattctggcctcaagggctttgggaattccctttaatctcctgaaagctcattcatgcattaatttttttttaatttaattcaaatttgtagatgttctgaaccatgaggaagtctgcaaaaacctagtctttcacgttttcacgttgctgaaatagaagtctatggtatcttttttgtttatttatttattttttgttttgggggttggtttgtttatttcatcagtgcctttggagactaatgttttttacactcacatctttgatccatacagacttaattttgatatagtaaagggtatggtagggaatcctgctttattttttcaaagtcatccagtaaacacaaaacaacactatttattgaataattcacagaatggaagttttagaatgtaaatactcaatatgtgatagggaaaagaacactaatacaaagtataaaatcttccaaagcaaggccaacccctattattactgtcttaccagtctgcactggatgtggtcagcttcttgaatcaccagggctgtccatgctagagatacttccatctcttttagctcaaaatatttacagaaatacatatactgttgggaatataatggaggatatataatcaactttttcatgttcattgttttgttactatacatagtagatgagtttcagaaaagttgtattacattaaaatcatatttttagttcccctggcaagtgttctctttaaagggattttactttgaattatttttgaaaatcatcttaaagggtaaataatgactccctaatttttctatgatgcaaataagagtttttatttactaagtttctcaatgcaagatatacttgcataatgcagattcttttctaatacaggagaaaaaaatgaggaggctaaattttaaaagcaaatcaatgtgtattttaaaaaatgcgattgttggaatacagacttaaagacatttcttaaggatcatttacatgaatccaatttgcttgcctctatatgagaggcaacattttgggtgattttttttttcaaaatctaatttttaagctttgtagggtaggtgccaaatggtattttaaaaacacacatttaaaaaaggaagaacgtgcagttttgcctggagtacagatggagcctgtgtcaattgaaggcattttgcctaaggacacagagaaaatcacttcttcataaagaccataaactccactcatgtttctgttcattttaatttgtagaaagtgggaagaaatcaaataggggggcatacaggttcatttgtttaaataatctcatcactcaaattttatatcagttatgctctaaaaattatttgacccccaaatcagtaacgtaatttttatatgaaaaaatatggtcatttctggttatttcttgttgcttctcttactgatttttttttctgtcatgtactgtgtattgtgtagatagggcccaattctattccatctccatacctcatacatatcttttatatctcctcactttggtcccctgcagcataccttatattagtaatttaaaaaatgatgatagtaacccttattccctgtgccaggcattgtgctcaggactgtacaggtaacttttcatttaagctgcaaaacagaaatgaggaaccacagagtatttgagagacaagaggcagagccagtatctgagcatgcgctttggcttttaaaaccccttccctttaccactctgccgatattctttataaagacataaatgtgaaactgctggtaagaagataatataaatcttcattgattgacatggaaatgtgtctattataaattgctatgtaaaaaactcagattgtaatacagggtaggcatcaggatcccattcttttaaaaataaatttgcatatgtacaaaaatggctggaaagatagattcctaaatgttaatagcaattcccagtggtttaaaatattcttctttaaatttttggatttcacttttcagggagcgtttttcagtcatggttctttattgcaagcaacaactctgggggaaaaaaaaagcagcagcacatggccagacgtgagatctttggttttaataccatgtgctgctgtatcatttatagatgataatctttttcattttatttcttccttctacttttgattattaagccaattctcatattatcaaatatttgggacaaagttaatcctgcctggcaataatttctcatcggttttctatttttaaagattaactcattttaatctgttctccctgtgtcattaatattgtagtggcatcaagctacagcacaaactgacctgtatgaaaaagggaaatgtattgagttataactggagcacagaggttgagtcagagattctcagtgtcatcagggtattgaaacaacttctctgtgattcctttccctctactctccccgctttgataggctcattcgcattctgcttcctcatccttgtataaaaagctgcagctattacagtctccacatccttaccttcctctcttcagctggagaaagaccatcgcccctgataggtcctgggaaaccatgaagaaacttctttcctagagaaacctcagcaaatgtctgtttcttatttgcccaaatagggtcacctgtaaattcctgaaccaatttctaaatatctaactactaaataccaaattcattactcaatactaattaccatgaagctgagttgggtgggtaggtctccaaagggaaatttggctgctgttagtaggggaagaggaaaatgaaggctgggaagccactcattctcactggcttttatatccaccccccagtacccccaccctcccaactgccactcttaactcttccttacttcatttttgtgacagttttattccacctacctactgaattattttcctcattaaggttttatgaccactttaagaatctaacataacttgcttttggccacaacatcaaacccaaactctcatatccatttaaatttttccctccccaaccattcaccaccacttgatctattatcctaaaacagctctcactttgccccttctttactgaaagttgtctgagtcctggctgcataacaggtgatgttcattcaccctatcctgtcatttgaaaattttgacaatctggcctcatctacaatttaactttttctcttgtccttccccttactatttctagaaaacaccatattctttcttacctccacaactttgaaaacactgtctctttccatctggaaatctttcttttcatagatttggataactaagtaacattctataccatatatttctgcatacttatgtctttttctgtgaattataactgttcataaaaacacaaactagcaatatttatatgaaggcatgtttcattcattagtttatacactgatcgtggtctataaggttctgcatgagcagatgtccacctacctcccagtcttgtgtcacattctcctttttcttgcttgctatgccttaccacacaacaaatgcctaatgctgtttcctgttttagaaattccatacacatatcctccacccaaaatgctctttctccacttcttcacctgaataaactctactcctcttttaggtgtctccttgaatgtcatttctttagaaagacctctgactctcaaaagctttggtcctcctgttatgtgcttttatgggaccctttacttttcctttgtaatatttatttcagttgtaattaattatccattctattatctcttgaatgcttattactcttaacatactctaaacacctaacacgataattagtactggtggatgctccattctttttttgaataaataatggtggatactttttctccacagcagtgctttttttcattaatcttcactggctaacaggtgctgcataatctaacattgcttttatttttggataaagcattgcattcaaatcatttcattagatttagaagtcttcctggaaatagacgtgaactaccaactctagagctttggaggtgactttacttccagctcttctgctgtcttctcctcccgtccttgatcatctcacttgcctaacaagtgagtcattcacataacatttaagaagaaactcccatttgctactttgtgtcctgtttgatgtcttcttttccttaaggacaagacacaggataaaagataagtattacacgaacatgtcttcatcatgcctggccttttccaatcagtattccaaatatatacatgcatataatgcactctgttcatttcaaatgagatctaattaaatgctattttataccaaatatcaaaaatccaattagctattcaagtagactccagaattttttctgtttggccattcttactgaatatttcaagatttattgagtcaaaattttatactatttaaactgaggctacagagtttcagaatgagttttagagaaactaattccaggtgtattcttactgatcctatgatatctttctgtgagaaatataggacaaatacttctcttctgacttcaaaaaatgaagaaatagggattatgtcaatagcccacttctctttggagcaatgaaaatgttctaaatcttggctgttcaatatggtagcactagcgacatgtgattattgaacacttgaaatgtgattagtgcactgagaacctgaattttaaatttaatttaattaacttaaggttacatagtcgcatgtagctaatgattagtgtatatcacagcacagctttatatgctcaaagtgatggataaatgggcttctggatttgtaaaagaagagagtcaagaagggactgttagccaagcgcagtggctcatgcttgtaattccagcacattgggaggctgaggtggaagaattgcttgaggccaagagtttgagaccagcctggacaacatagtgagattccatcgctacaagaaaaaaaaaagattgattgttaattctggttctctcctcatttctcattcaggtgaggggacaattcacaagcagacacttgtttctaataggatgtcctgactatgtgagacattccatgccctaaaactacacatcacctcatcggaaacactgaaagacagacttctgccaaaataatttgctaagcttgtttaaacagacaggctgggtttcttctctctcataagactcagatatagaaatgtttaaagggttccgaatcataccaataatatgagcacgtattatggctgagtgtttgtggaaatattgcacatccacccaactcatcacctgttaagtcacatctttgtttaattttcaaaaatgaaatgattcatagtcatttcattcatgggaattggtgccagtttatttctgggagttcaattgccagcttctggaattgagacacaaatatcttaatataaacaggctatatgcaggagctttcaatcttctttccccttggaaaagcaccagtaatttcatatttggtctaataaatcagtttccggaagaatgtttgctgacgtcattttttatatccctcatggattttatatggaaaaacagcctggtcatgttcaaagcaatagattagttctggtagtgtctttcggcctgtgggagccctcattcctctgcaatcacggtttgggagtggttctatatcctgatacaagagaaatgcttttgtgaaaggcagctttggaggtatgttgagcagagaagctggaaactgatctccttaaaacattgatttcatcatgtctgtgtttaagttgtggctgcagtttgctattttcggagacaaggccaatgtcagcctgtattcaaagctctctgtagtaaagcaatttatacttactaggtgaaccacactgcaaaggcccttctacctcacatttaaaattttatctatgtgaattttgatgaagattaacagtaaaggaaggcttgaagccaaagagatgagaagattccaccaaaaaaaaaaaaaaaaaaaaaagcaacatgcagcataaacatacttaaaaagaagagaggttttctgtctggagcccacactgctgtgattgtatgtttaggagaacagggtgattttcattcatcctgtagctgttttccatgctccaattctagtaattcataatacacctattaagcacctactgtgtgcatagaactgggctcagtggtacaagagaatctgttttcagcctcattggctattttaagccatgcattttaaatgaatctttatttaaaacaatttcaaacacaggaagattgagagactaatacaatgatcctttatgtagtcatcacccagctttaacaattagcaagcattcatcatgtttgcatcacttattcttttctgttgtagttattgttgctaaatatttttaagcaaatcccacatttgatgtgacttcccaacacatttgtgcatatctctaaaaaatattagcattttctcccataactacagtgccatgatcacacccaagaaaattgagaatatttccctgtaccctccaataaccagtccatattcaaattttcctacttattaaaaaaatgcctttttaaaaattagttcgttcaaatcaggaactaaacaaggcctaacattacattacattaacatagccattaccataactgtaaacattacattaatccaatccaaattttcttttatatataatatacttttatataaaaatatttttattatatttatagaataaacacacacaaacacacatatatttgacatgttgaagaaatttggtcagttgtcctgcagtccctgcactccaaaattctaaatttttctgtttacttctttgtggcatcatttatcttaatcctttatccctccattttcttttctcatttttttttcttttctgagatagagtcttgctctgttgcccaggctggagtgcaatggcgtgatctcagctcactgcagcctccacctcccaggctcaagtgattctcatgtctcagcctcccaagtagctgggattacaggcatgagccaccatgcccagctaatttttatatttttagtagagacagggtttcaccatgttggctaggctgctcttgaactcctggcccaagtgatcagcctggcttggcctcccaaagttctgggattatagacatgagtcactactcctggaccctccattttcaataaacttgaaagtttatgttcaatttttcttttggcaagcatgcagtacttcaaaagcggtgctatgtgctgcacattgtatcacatcaggaggcacacaatgttgttcataccactctctaagcatcctccatcttcccctacgaagtttaagagaaccttggggaaatcatttaaccttgcagagcctcagctttctcatagagacaatggggataatagtagtacacccttgcaaagtttagtgtaaagattacactatgtaatctttgtaaagaccataacatggtgcatagtacactgaaaaatataagagaccttaacttattatgaataaggcatgcaaagtagttagtacagtacactggtctaggagagtgttaataatgttagctattattgcctttataaattattttggctgaacaggccaggtaaatttcattgagtagacagtatttgaaggatgaaatgaaaaggcatagaccgcaacacactaagcctcagagaaacctctctgataagtttctttgtaggactagattataaacttcaagatggcaggaatgtattaattatttatccataatatgtagttcaatgcatggccctcaataatatatgagtaaaaaatcctacacaaactcaactttagactggctggtgtcttattgtgaagtcccctgcccccatccctatgatacccacataacatccccttattcccagctctggacacttgcctctgccatttccactgcttagaagacctaggcccagccaggcacagtggctcatgcctgtagtcccagcactttgggaggccaaggagggcagatcacctgatgtcaggagttcaagagcaccctggccaacgtggtgaaaccccatctctactaaaaatacgaaaattagccaggcgtagttgcgggcgcctgtaatcccagctacttgggaggcgaggcaggagaatcacttgaacccgggaggcagaggttgcagtgagccaagattgtgccattgcactccagcctgggcagcaagagtgaaactgtctcaaaaaaaaaaagaaaaaaaaaaaaaaaagacctaagccctctgattctaccaatgtaagttggaccagttcttccatgtctttctcttacctgtgtcctttgggaggacttttctgagactgttccaccctatatcccactttttcttttctcaatacctacatcatactctttgttcacaaagtttgatgcttatactttacagatttgtaggttgtcttgctttctaataactccctacacttccatcttatttcctctaaataaattgtaaactctttaatgggtgatgtgttagtcagtttttgctttgttacaaagagatatctgaagctgtgtgctttatgaaggaaagaggtttaattggctcacggttctgcagactgtacatgaagcatggtgccggtttctgcttctggaaagggcttcaggaagcttacagtcatgatgagggggaaggggagccaacatgtcacatggtgagagggagtaagagagaggagggggaggttccacacccttttaagtaaccagatcttgtgtaaactaacagaacgagaactcactcatcaccaaggggatgacactaagccattcatgaaggatccactcccctcatccaatacctttcactaggccccacctctaacactggggattacatttcaatgtgaggtttagaggagacaaacatcccaaccatatcagctgagttggtgttttctgcctttccatcttctattctcctcttacccaatactcattcccaaccgaaacacctggcacaggagtagacacagtagaacttcatataagtactacctgctaatttagcatctccttattacacctttttcaatgtacttgggaactcaaggacatggtcatcaatacactgcctggatgagagtggcatatccctactaccactgcattatgattgtctgcttatgtgcctgtgtccctatcaaactgatagagtcctggaaacagagattatggatttttacttctgttgccctaggaacttgcacagggattggcacatcacagataatcaatcaatgatgaatttaagaaattgtgggccaaccaatttgatgaaattcacttttgcctaaaaaaaaaatttgactgactatttagactagttcagtcaacaaagtaagatgtttcaaccatttacacatatgggcccagccctcatgagaatatgaaacatatttttaggagtcagataaaattagaactaaaattgaaatggaagaaaaatattaaagacggccattgactactaatggctttattgttctactcaggagcatcatggagctttcaaggttttaaacttaaagaaaaactcttaacagtagaatttaaagcaggagagagagctagcttgaggcctcttggtactgcttaattcacactcaagagatatctctcttctctcttctggaagctatactattgttcctccttccccacccagcgaccaaaaaacaaagcagcttcaagtcctggaaagtacagaagaaaaatcttctctgctcatgttgtaggtgtgtttcttccactacttggggtggaattcatcaaccaggttggggcatgtccaggctgtgttccacacatcttctcctgaatcctcagcccaagcagaaatcagacacctccatgctgtcctttaagagaaaagctggcatttcagtgttttaaacattggcatattctggttcaatggcccagctagatgtaaggaaggtgtgttacccaatttttttcatgctttgaaccaaaaagatgttcttccttatgttttactccacctgaccattgcctggcttgaagaaaaaaagagaacacttttcaggagctgagaaaattggcattgatttaacataatttagttaaaagttagttctcccctgccatgagccacagctgattatttagagaattattaccattcattgttcattgagttttatctttctaaattttcactgattagcatgatttgttactaggaaaaatattatgattttaattgcattttggcatcttaaaagaatgtttcacactgcttaacatctgcagtcaacagatgtttaaacacaactccctcaatgactaaaatttggcaaaatgtataatagttggaacagcttaaaattctaaatatacttctaggaacatgatacaggcagatgaaatactacttgtgtgtgttttatattaaatattaaaatattacatataccatccctctcggagatgacaggtttcagggaaaaaaacaacagccaagagatgtttcaaccctaccataccagatatattctatctataagcagggctatgtcttatggtcactgtcaactgcagtggggacccttttttaagtgctatttattgtggttaactctagaggctggcagaggcaaagctgtgagacagacacgtttgtcccttttgcttccccttttggcatccttcttttctctgactcagatcctcaggagctttcatgaagatatattctaagattaatatgtcagacttgagtttaagttaattggtcagccttcagttaattggggcaaagattcattcatatcagagtgtgtgtgtgtgcgtgtgtgtgtgtgtgtgtgtgtgtgtgtgcacgtgtgtgagtgtggtgtctgtctgctgtctgtttctcaaggcaggggttcagagaggagagaggatgacccaattagcatttcatcaactatttgaccaaccatttaagccgttatgtttagcatggcttaaagaaatccagagaaaaatcatgaatttcatttcgatcacaacttttaacagtctgctcctatgggcactttatgacagttgatgactcggggcttagcagagagttgcttcctgtccccttgttgaactcatccccaatgaaaacgccatttctacatcaagaatcctagaggctgtagcagcaagaatgagaaatccacattttctgtccctggatggttaagttcacagtcacaggaactgtgcagatataaagactttcaatcaatgtatctctgcctaagcttatgaggtcattctgttctctgttactgatttaagtcagtaaattttgagtacagccgattacttaatatattatgggtgggtctactccaatcaattgaaggccttaggagcaaagactaaggtttcctgaagaaaaaagaaattggcctcaaaactgcagcatagaaaccctactagaatttccagcctggcctgacctgcagattgtggactcaacactgactgaaacatcaactcatctgaattttcagaccaccagcttgccctacagattttggactggctggcccccacaactgaataagccaattccctaaaatctcctctctctctcctctccctctcgactagtacacatgtgtatatgtaacatctggattcagagaaagtgactatagccaggaggaagtagaatcatggagagataaataggactaggctatgagaagtgcaatgcaggtggtccatcaggaaggggaagcagcttgtacaaagaccaggagatgggggtctgtgcttttgagggggagaatggagggagagagcctgagagtctgagtctggagactgtgttagagagcagtgagtactaagactggatggattggtaggacccaagaactgatgtgtagaaaagagcctcttcttttttttccacgcagggggcttagaattattgcattttttaaacactgagtcatcttttctgtagtactctacaacagagtccacttcagactgtgcagctgtccccagctatcaccatatcctctgtctttcatatctatcctaaaaggcatttgctcttcctaaaagggatgccctccaaagaaattttaaaagaatcttatcaaggggccctggagaagaaagggatgtgagggtcaagtcacaactttgaggggaaatagaaagagggctcctttctgagaaagaagaatttcaaagagtccaagagaaccaaaaattcaggacccaggagggtaagcattcctgtttttgcaagcttcacagaccatttgagtgagtgggtttttcaggtgacatttaaatgaacaaataatatccatgtctcagggtcagaaatggtactttgcaactgattctgtccctcttgagaggcttctgcaagactgagagggtgggatgacttaatgaacattaaaaacaatgttattaggctggatatggtggcacatgcctgtaattctagcactttgggaggctgaggtgggcaggcccaggagttcaagaccagtctgggcaacatggtgagaccctgtatctaataaaaatacaaaaatttagccaggcatggtggcacacacctggagtcccagctactcaggagactgaggtgggaagatcacctgagctcaggaagtcgaggctgcagtgagccaagattgcactactgcactctagcctacatggataggagtgagacctgtttgaaaaacaaaaaacaatcaaaaacaaaaaaaaacaacccacacaatgttatttttaaaatactgaggggagagaagttggggaaaaaaagggaaaacctaaaactctccataatcctaccatcagaaaattacactaatgtgataagtgactttctcccctctgaatctccaattccattacttgtagtaaatatgaatcttattccacaaactcagacatgcaaaaaaaaaataccactttactttttacataaaattaattctaagcctatagcaactctctttatcatattaggtaattaggaatttggtctcagatattattgtcaccctcagggatggacaagggtctcagggttttgtgtagcaccaaaccctaataagatctcttcagccattgaacttactctacaatattaactgctgaggtgtccatggtctcagactacaaggtgtcttccggttctggcttctctgctgccgcttttcaaatcaggagaatctttggtgaggctttggaattcccagctccctagcccagcctccctagggtcttcctcctcatcagagtgctccagaattcagactaggattccattcacactccaaacaccttcccttctctctccagttcctccaggacaccaagcataatctcctcaatgggtttaggttttacaaaattcagtaccagaatcggaagtgtcttgcagacaactttggcttctggccctatgacaaacatctcccttgtggcaggaggccacaaaaagccctgaccatctgcttacaagggaggaggggaagaaacactgggaggacaaacacaagttaatattccaaaaattataccactacaaactgttgaccgttttctaagtctctttccagaatgttcttgtgcttataaagcaaaaatctctctacacataagcttttcttttttaagcaaaaaggggattgtactatatatatgcagttacagcttgctttttttttcacatagtatagtgtggacactatactatgtgaaataataaggacacttcctagagtgtccttattttatttgtgacattgggtactgctccactgatgggtactcaggtggtttctattgttttgctctttcacacagtgctgtattgtgcacgtacttgtacgtctctgtgttctttttctatcatcactttctagaagtgaactgactaggttgaccaagtggctagtgaatcaatacagaagtttatttgcaaacaggagcatagttatctgtttctctgcactgcgagccccggccaactctggtgggttggttagcatatgctggttttagagaaagagcctgaaaatgcatttctcaagatcgtagtcttcatgcatttgataaagttggtggagttggtgcaaagattattctaaaagtctctctaattagccttggtgaataggactctcattattagtgtataggaaacaataatctgggctttacaactaactagctaagagaccctggacaaaccatgtccacctcgaggtctcaggtagatcatgtaaaatggagatgggacacagataatctcctaaagacttcctgaagtgatatcatacatattgttatacatactctgcattcctaaacatacactgtcctgggcaggtaacaagtatctgtctgtggattgatgacagactttgggctatattgactttgctatgcctcttcagtttcctactttatatttttggaacggtataatacatttgtgttagcttgtgttcctccaaaagctgacccagggacaagggttcaagtttaagaggtttatatttggaaagtgcaggaaagatcaggaagggaggtggctgatataaggtatgttatcaagccagctgtcaccgggcttaatcccaaagggcaatgctgagaaacagcgttaaaacccatgcttcagagttatctgcctttagatcaagggtgctcgggtgtttatacatgaaatcccatcagcacaccgtaatgtgctaatgtgctaattaccagcacatctagcctgccatgcaaaggctgaacagcctgccttggtttaaggaaaagccttcaggtcaagagtgcaaaaagagttttctggaacacagctaagggatgcgggcatggccacagtgtctactgtgtaactctcacagttcccctcacaccagtgttgctttactcttttgtgtctttgctcatgttgtattcactcctttccctttctgatcaatttcaaatcctcagacttcctatgtttgtgtcctgcctctgctacttcctagctgagtgactttgggcatgttacttaagctctctgtgcctcagtttcctcatctggaaataggcatagtgataattctcatctcattaaacagttgttaggatcaaatggtaatggtggaaagcacttatggcagtgcctaccacttaataagtcttcagtaaatgtcatcatatttattatccttcaatagctacttcaagtggtagtgccttgaagaaagcatccctgagacttcaggcagggttaagggctcaggccccttcttaacacattatgatgacactttccatatgcaagtttatcttctcctatggacagtgagtccaggaaggcgtcactgtggcttactcaggtctgcgtcctctgcaattcttgcaggacctaacctgccattctgttaatgagtaatagacagagactttgctttcattcactcataaataaacctttgctttaagattgaccctgagtaaaacgtaaatttcatcaaactgtagtaacaatacactttctttatcctaacacatacattgccaacactgctcccttaaaacacacacacacacacacacacacacacacacacacgcacacacaaaaccactgcttagtatttctgaaatcaggttgtcagtctaaatactgagatttgtttttcattttatctgcctttctttcacaaagtaggctattattaaataaatgctagactctagtattaaaattgacaaatgtatggtttagacctcaaagtgaaggataacttggaaatagttctcggttgctcttcaagaagaaaacaggttcctggggtgcctcgccatgtggtggatctcacactcccgtcattctgctaacacaatcccaggagctgattctgttgcgtctcgcagggtatcagtctcatccagatcaagtatgagcagggcagactggtaggtcctaggagtgggaagggacagaagaactaatttgatgccatgttggaaggtcaagacagagatgccaaatcagatgtcaggatggaggagccaacaaaatgggcaataggggacacagttgaggaatggagtgacagtagcaagagagtgagaagtaggaactcagcagagatgcacacccagccaagaagttaccctgcattaaatgacagtgagctggcctggaatggacaccccaaaaccaagatccatggcagaggggacactggcagtacagggtctggccctggacatcaggtgggtgaaactgttggggatggaggagaagaaggcattgatgatgaaccatgagtgttgggagggtttagtcagatattaaacattgcctcatttaattttgcttgaaaagaaaaataactctggttagaatattttagaatgcaggcttgctagtatcactaaaccagaaaaaaaaattgtcaaaaatatatataaaaaagaaaaacaagagcaaatccagatttgaatccagtctacttgagttaacagctggatgaatttgggcaaacaatttggacaagcgagttctctgcatttaacttttcatcatgaaatacacataatattcctgggctgttgtgaggaattattaagataagaagataatgacagcaatggtctactgaatacttaatatttgcaggcacagtaccaagggttttcccatacttggtcttattttctaaaattagcctacaaggtaagtaccatagattcttattttatagctgcaaattgagtttcagtgtgattaagtaacttgtgccatgtctcgctaaagaatatatataaatcatcacacatagaatacagtaggtgtttaacacatgtgagttttctcctttcactctgcttgcaatgctagccatagaagattttaaaattgtctgatttttgaagaaaaaacccttggaagagcactccctctctgctggactagagtttaactatcatcatgttctttgtgaatttgatagccttttaatccaccgaggccatgaccttcttgtaatgtgttgacttcctctaccgccagtgtttctctcgagggacctccatctgcatttgtttgtggctgtccctctcagtgacatttcctcctttacctgattctcaagataatttgtttttcatttgagcttcagcagcctgagagatgatgtcaaaatcaatcaatcctcctacaagctttgtaaatacaatcccttggctttgcagaaagggtatctctattgcccagttcttcctggagcagtggggccacccaaaggagaatcaggaggttagaacacatcctagaacatgaaatctcatgcatgaggggatgtcagcctcatagcatctgagtcctagtgtgggaagatgggagctgaggaggtgtcatcccctgggacttctgggagctgcaggtggaaccttagagcccttggtccaatgtggataataaggagccctgttagagagccatagaaaccatccctgagtcatgtcttcctttctccttcaatatgaccttctctgggagtcttcttgcggggaggcagcaatgccttggaaagtttgagctggtttctgatgagaggttgaggcagggatctcatggttatctccttcctcaaaatggagccagaagatgcaagccagctgtcatggactgattgaagcctgttatggatttgccttttaatgtgtttgttaaaaatttgaatcaggtgcaacatttaaaatgggagacttcacatgaaactccagatttctggcttcccttgaaaaatcacacctgataatcctgggctagcatttctatgggcaagagtaggctggatctagggaagcctcttcaggtggggcaggtgcagtcctgtgtgccccagtccccacctgaccccatgctcccttaggttacctgtcttgttccctgggcatttgagttttgaaagaaggaacgggaaggaaaataacaatagagttacaagacttacaacctaacacagttaataacaggaaaagtaaaaggcgcttcaggtaactatttcctttacatatcacgcaaaacatccagttttgcagaaagataaattggagaccagagaagtgaattaagctgcttaaagtgttggtaaatggtacaaccaaaatttgaggtttggtctctttgactccaagtcatgtgaccacaaaatcccactttgctacagtggcctcccccagaatctgcttccctttgattaacaggatgccctcacgcttctgcatatccagggcacctgatgccctgtcagatatcaaagagttaatgttataccagtcatcattcttgataccaagaaaattcaagaggagtcttgtttttctctgatgctggctggcatcctctctgctccctgagtctctaatgagaatgtgtacagtggtattcaaatagggtaggagaaacttctttgtgtatcactgaggtcaccatttgcattaagggaaaagaggttcgatgactctcagttcggcaattcagcagccatctgtacttcacatcactggcctgaattttcagcctcattaaattctttcaggtcgtctggtcccaatctttgtggttacccaagtgtatatttatgtctcatgagttattgccatttctcacctgtgcttaactgctcccacctcccactacccttaattgatcttgcagtacttctggtattttttttaaagtcttccctttcccaattatttccaagagcccacaggggttactgcatgtgtatcagacactgtgtcctctgggtttctacatggcttctaccttgttctgtcaaagctccctgtgaactatttttgctgggtaccaccatctcccactggacaccgccgccaagaggtgtttaaggtcatttggggttgcatgcactggtgggtagaatgaatgtttctttctcatggtctgtgtttcacatggctaccaaactgctggtagtgccatgtcttagggagcttagcttggttggtttttgtcacaacatccctctgcctccatacatacctttgcattgctccacaggattcagaggagatgccgtggggaactgggctgagagatataatactgagctagggtttgctccttccctttgatgactaaggctttatttttgcaccaagactatctgcctagtaccctcttcccttaggctgagttttctcccaggtggctctttactcccctgtgcaacccttgctatcttgcctgtattgggcatgactgggtctaagtgatggatatgtcttggtggctcgcagtcaaattggaacccctgaaatctgtttttttgttttctgtttttttgttttgtttgtttttttttttgttttgacaaggtctcactctctcacctactccagagtgaagtggcacactcttggctcactgcagcctcaatctcctgggcccaagtgatcctcccaccttagcttcctgagtagctggcactacagacacatgccaccatgtgtggctcattttgtgtatattttgtagaggtggggttttgccatgttgcccaggctggtcttgaactctgggctcaagcgatccacctgccttggcctcagaaagtgctgagattacagacaggggccaccatacctggccggaacccctgaaatcttaggtggcagtattttatataattttgtgtccttaaagcccaaatcacctgaaatagttttatcatacagcctcaacccagacacagattggcttaagtgttcctctaagtgcttgggtatgcagcttcattgtcttctttcctaaagaaacaagcctgtaactcaaagattttgaaatttggattcttgcttgatgtaagctgagtagcacggttataaggctacagacaccactgcaataggtgggactccttgagccagcttaagccacaaggaggaaatggaagtggaacccaaggaaaggattatggctaggtcttgggaagaagggattgaggcagtgaacttcctcttgttcctgccttcctctgtatctttatgcagactgtctacctttgactcccagttcacaaggtggcatatgaccatcccattcttttcaggtttacatataatagttccagaaatatgcaagacttttctagtcccaatttaaaattcccaagaggaagaacctgattgtttctgtttaggtcagtgttcatctctgattcaatcaactgtgttccattcaccaagtctgtgtctaaggatcaaagatagaccagagaggttacagtgagctgacagccacatacacatccattctacttgaccatttttttttttcccattttctcacatttacttgtacctttctggaaaggcactgagtagaggggcaatactcaagataagcaatgaaagttaaccataatgttttctttcttttcttttcttttcttttttctgtgacagggtctcactctgtcacccaggctggagtgcagtagtgtgatctcagctcactgcaacctctgcttcctgggttcaagtgattcttatgcctcagcctcctgagcatctgggattacaggcgcacacgaccacaccagctaatttctgtatttttaatagaaacggggttttgccatgttggccaggctggtctcgaactgttagcctcaagtgatccccccacatcagcttcccaaagtgctgggattacaagcatgagccactgcactcaaccctaacaaagaatcctagtagctaatgtttactagacatttcgtatgtaacagatactgtattgagtgcatcacaggaattatctcacctattacatacaagaagatcttatcattgattattattattttcatgtgcgtccctgtgaagagaccaccaaacaggctttgtgtgagcaataaagcttttaatcacctgggtgcaggtgggctgagtccgaaaagagagtcagcaaagggagataggggtggggccatttataggatttgggtaggtaagggaaaattacagtcaaaggggggttgttctctggcgggcaggagtggggctcgcaatgtgctcagtgggggtgctttttgagccaggatgagccaggaaaaggactttcacaaggtaatgtcatcacttaaggcaaggaccggccatttacacttcttttgtggtggaatgtcatcagttaaggtggggcagggcatattcacttcttttgtgattcttcagttacttcaggccatctgggcgtatatgtgcaagtcacaggggatgtgatggctgggcttgggctcagaggcctgacattcctgccttcttctattaataagaaaaataaaacaaaatagtattgaagtgttggggcggcaaaaatttttggggggtggtttggagagagaatgggtgatgtttctcagggctacttcaagcaggattaggggcagcgtgggaacctagagtgggagagattaagctgaagggaggtcttgtggtaaggggtgatattgtggggatgttagaagaaacatttgttgtatagaatgattggtgatggcctagatacggttttggatgaattgagaaactaaatggaataacagaaggagaaaaacaggtataaaaggtctaagaattgggacgactcaggatatctgattagagagtgcctaaggagatacagcatagtcctgccagcaaagattatttatttacttcaagagttaacagtggcagtttggggatagcaccaggagatatcagctgtgatggcttggaaaaacagtgtaaactggcagtgtaaacaagagcagggtatgagtagttgagaacggtgaataggagtatgactagacagaagatagtagggatgacaagatttttggggcacagtctaagttggtctggtgtctggaatgagaccggggcctaataaaaaggagcatctatacaggagcttaaatgggctgtaccctgtagcattccgaggacaggcctgaattctgagaagggaaagtggtaaaagtattgtctagtcctttttaagttggtggctgagcttggtgaggtgtgtttttaaaagacctttagtccattctacttttcttgaagacggaggaccgtaagggatataaaggtttcactgaatactaagagcctgaaaaactgcttggctgatttgactaataaaggctcgtctgttatcagactgtatagaggtgggaaggctaaactgaggaattatgtctgacagaacggaagaaatgacctcagtggccttctcagaccctgtaggaaaggcctctacctatccagtgaaagaatctacctagactaagaggtattttagttatctgactcaggccatgttgagtaaagctaatttgccagtcctgggtggggcaaatcctggagcttgatgtgtagggaagggagggggcctgaataatccctgaggagtagtagaatagcagatggaacactgagaagttatttcctcgaggatagatttccacgatggaaaggaaatgagaggttctaagaggcgggctagtggcttgtactatagtataacctgcctttgctggtgtgtggcgattaggcctggtggaactgccgtcaataaatcaagcgtgatcagggtgaggaacaggaaagaaggaaatttggggaaatggggtgaatgtcaggtggatcagagagatagtcatgggggtcaggtgtggtatcaggaataatgtgggaggccggattgaagtctgggccgggaacaacggtaattgtgggagactcaacaaagagtgagtacagctgaaggagccggggagcagaaagtatatgcgtcaggtatggggaagaaaatagattttggaagttatgagaactgtagagagtgagttgagcatagcttgtgattttgagggcctctaaaagtattaaagcagcggcagccgctgcacgcagacatgagggctaggctaaaacagtaaggtcaagttgtttggacagaaaggctacagggtgtggtcctggctcttgtgtaagaattctgaccatgctagccatgcctaggaaggaaaggagttgttgttttgtagaaggtgcttgggtttgagagatcagtcggacacgattggcagggagagcacgtgtgtttttatgagaattatgccgagataggtaacagatgaggaagaaatttgggcttgattgaagtaatgggggctgtctgtgaagctttgcagcagtacagcctaggtaatttgctgagcttgatgggtgtcagggtcagtccaagtgaaagtgaagagaggctgggattaagggtgcaaaggaatagtaaagaaagcatgtttgagatctaggacagaataatgggttgtagagacaggtattgaggataggagagtatatgggtttggcatcacagggtggataggcaaaacaatttggttgataaggcacagatcctgaactaacttgtaaggcttgtctggttttaggacaggtaaaatgggggaattgtaaggagagtttataggctttaaaaggccatgctatagcaggcgagtgataacaggctttaatctttttaaagcgtgctgccggatgggatattggcgttgagtggggtaagggtgattaggttttaatgagatggtaaggggtgcatgatcggtcgccaaggagggagtagaggtatcttatacttgtgggttaaggtggggggatacaagaggaggacgcaaaggaggctttggattgggaagaagggtggcaatgagatatagctgtagtccagggatagtcagggaagcagataatttagttaaagtgtctcagcctaataagggaactgggcaggtggggataactaaaaaggagtgcttaaaagagtattttctaagttggcaccagagttggggagttttaagaggtttagaggcctggccgtcaatacccacaacagttatggaggcaagggaaacaggcccttgaaaagaaggtaatgtggagtgggtagcctccgtattgattaagaaggggacaggcttgccttccactgtgagagttacccgaagctctgcgtctgtgatggtctagggggcttccgaggccatcgggcagtgtcagtcttcagctgcgaagccgagaagatctgggaaggagtcagtcagagagccttgggccagagttccagggcctctgggagtggctgccaggtgagttgaacagtccgattttcagtggggtcccacacagatgggacacggcttaggaggaatcctgggctgcaggcattccttggcctggtggtcagatttctggcacttgtggcaagctcctgggggaggaggttctggaggaacgcctggccgctgagtttcaggcatttggaagttcttgtgtgctggagatgtggctggggtttgtctcacagtggaggcaaggaattgcaacttttttctattattgtacaccttgaaggtgaggttaattaaatcctgttgtggggtttgagggccggaatttaatttttggagttttatttaatgtcaggagcagattgacattattttgagaataagacggccttttgagcttttagggtctagggctgtaaagtgtctcagggttgctgccaaacaagtcatgaactgagctggattattatatttgatgaaaaagagcctaaacgctatctgatttgggataaagaaaaaggagcattaaccttgactatgcctttagctccagccacctttttaagagtaaattgccgggcaggagggggaaggctactcacggaacgaaactgtaagctggaccaggtgtgaggagaggaggtgataaaaagattatagggtggaggagcagaggctgaggaagaattgggacctagctcggcctggcgaggagcagcctggggaggaagggagaggtcagatgggtctgtagaaaaggaagattagaaagactcagcgacgcttggtgttgggactgaggggacaggcgggagggaaagagggaagatttgggacgagttgcactgggcacagagactgggaagggactgatgtgtaaaagaatgcctggatgtcaggcacctcagaccatttgcctattttatgacaagaattatttagatcttgtaggatggaaaaagtcaaagtgccattttctggctatttggaactgctgttgagtttgtattggggtcaggcggcattgcagaagaaaataaggcatttaggttttatgtcaggtgtgagttgaagaggttttaagtttttgagaacacaggccaagggagtagaaggaggaatggagggtggaaggttgcctatagtgaaggaagcaagcctagagaagagagtagagaaacagagggaagaggtttgggggttcttaccttccagaaaagtggaaaaaggggttggggcacagagataaggggttggggcacggaaataagggatggggcacagaaataagggatggggcatggaaataagggatgaggcgtggaaataaggggtaggggcacagaaataaggggtcggggcacagaaataagggattggggtgcagagatacgaggttggggtacttgcccctcctctagaaaagtgggacttgccactaagagtgaaggagaaggggttgaagggtacttgcccctcccccagaaaagcgggacttgccgctaagggtgaaggagaaggggttgaggggtacttgcccctcccccagaaaagcagagaaggggtagagacaaggagagaaggggttggggtacttgcccctttcccagaaaagcgggacctgccgctaagggtgaaggaccaaggcaggcatccctgcatggtctgacacctttgaaacgtgggtgaataatcaggcgtccctgcaatgattaaacaccaagggaaggctgccttcccagtccgtgaccggtgctggagttttggatccacagataaaacgtgtctcctttgtctctcccagaaaatgaaaggaattgaaattaagagaagggagagattgaagagtggaaaggagaaagtggttgagggacagtgagagaggttggagaagagagtaagaagaggccgcttacctgatttaaaattggtgagatgttcgttgggctggtcggtctgaggacctgaggtcgtaggtggatctttctcacggagcaaagaacaggaggacaggggattgatctcccaagggaggacccccgatccgagtcacggcaccaaatttcatgtgtgtccgtgtgaagagaccaccaaacaggctttgtgtgagcaataaagcttttaatcacctgggtgcaggtgggctgagtctgaaaagagagtcagcaaagggagataggggtggggcaatttataggatttgggtaggtaagggaaaattacagtcaaaggggggttgttctctggcaggcaggagtgggggtcgcaaggtgctcagtgggggtgctttttgagccaggatgagccaggaaaaggactttcacaaggtaatgtcatcacttaaggcaaggactggccatttacacttcttttgtggtggaatgtcatcagttaaggtggggcagggcatattcacttcttttgtgattcttcagttacttcaggccatctgggcgtatatgtgcaagtcacaggggatgtgatggcttggcttgggctcagaggcctggcaattattagcctcatttcacatgaggacaccagggttagggggcgggctggaccaagatctatgtggagagcagagttcaacccaaaatgcatgctttttatcactatatttagagatagacacacctggtttcaatccttgaggttgccactagctatgtgatttttgaataatcattctgaatcttagtttccacatctgtaaatgaagataaaaatacctttccaattaaaaatgattttaaactaggcaacttaggcaaattattcttttccttcatgtacctgggctttcccgcctcatctaagcacacttgttctttctaatgctccctgactgtaaccaaaacctccagagcccttcatccatcctctgattgccatgaattgccaacatcagataaatagtttaaaaagtggcaagaaagtaggatttcaagtcagaagacttggatttgaatcttgcttcagctttgtattaattgttatcattctgaatcatagtttccccatctgaaaaataagatgtggagttgttattattggtggtggtctgttctaagcattaaatgaagaaatgcatgtcaaaccttctgaaaactcagacaccaaacacttggaaaggagtctgttacagtctcaccaatgcaccacaatgtagcagtctctccttgtgaggtatcacccaagaccaagagaattaaggagtatggacccaaagggtgaggtcggagtgaaagtttaataagtgaatgaagaaagctctctgttgcagaaaggggacctggaagaggattgctgtttttcacagttgaatgcaaaggcttttataggaaactgatgagggctgggcattttgtttgcataaggcatgtttttctggtagctccaccccatcctcctaaggtgcatgtgggcccttagcttgagttacccatattgctttgttgcccttattatgcatgtgtcaggggatgaaattttccactgctggcatgtctgggcaagtcacctgtgtagcctttcttatctgtgcagctgtgggcatgtcttaggcaagtcccccagtgtaagttcccttatctgtgcctgcaggctgttcttttgtttctaaaaattcaatccagggcccatcctaactgcctgcctgaccggtttctttctttttcctctctcaattcttattaaggcagaaaaattctagaatgactttttgtcctatagccttgttcccagaatgctttggaaatgtaacagccaatttatcaagacaggggaattgcaatagagaaagagtacttaatgcagagcaaagagaaaaaagataaagttcttttaaatatatatagcttggatattcatgtttaattaagcaaattttaaccatagagctcttttgtttaaagaaaatctcttttaaatctcttattaccagactctagtcaggacagccaatatttctggcctttgaattctaccccaggtaaccgcccacatgaaattagtaagttttaattaaggttataacttaaccatggatacaaaaggtgttttaaagagatggtaagcagctttttttttttaaaaacaagatttagaatatccccaaaggtagtacagtgaaaggaaaattcaagacaggaaatcagaagctatctatggggtgaaaaaaaaaaaacctcaataaatggcaaagttccacaaataacaaaccagaaaggaatcattctgtaagccaagaattgaacctgggccaccattgtcaagagataaaaaccttagctactgagctacacagcattgagcagtttctactgctctcccccgaagaagtctacagcagctgatctgaagcttgcaaaggcttttaagtgctcaagataattcttagggctgtgatatgaacccccaaattcctgtcctctggatggtggagaccaggatgaagtacctctacatggtcacaaagttaagctcttaaagacacaaaacaagacagaaatttcatctggtattggtttcagggacccacaacaaagtttataactgaccagcctgccgggttggcttgaaaagcaggattacaggggtcctaaactcatgttctatcctgtgacacccttctctccattacggaaggacaaattcttagtacaaagtgcaccagatttgccacagcctaagactagtctcacaaatccttttttactattcatcaaacctttgcagagacacacagtgacatttattgcttaccactgcccccctccaacacacacacacacacactcacacagacacacaatgcagagagacagagagaaagagagagagagaggccagacacttttctggtaagaattcttgccctttgtgccagcatatcaggtttctgggtcccctttctctgcagcttctagaagaatggagcagcatttgatggccctgttcaccgtgccatagacgtgaggggaccaagccccattacaaaagaaaatgatccttttctgttttatggaaccataggcaaaagcttctcaatgttgcaagatgctgcctgatgggctacatggggaaccaaattaacattttccattccagtggaagcaaaatacacataacgctacagacattggtcaccttgttcagcacccaacatcgacctggcaagactcgaactttttcccgttggtccctgttgtctttgatctacacaaagtggggaatggtgacctccatctgggaattcaatgggtgatctctgggcaagatgaagagcagtcacaaacccgatccagggctgttaaacttctttcaggactcactgaatgtgaccagatagataaggagagttctctgagttaggcctgctagacttccatcagcaattccttcagagatctcctccacatatacaaatacacacatatagacaagacagacagaaggctttccaaatcaagattcctaaccaagaattccagagtatctcttccaaactatcctcctattctctgtttgagaaatctccctgaaatcttcttgattgaggagaagtctcccgaaccaagactctttttactagttaggcagagccaaccgagaccccccaggagccaaaccaagacagacaccccatgttgtagctacagacacctcacaatggagctacagaactagttgcgaaaaggaaggagacattggcagcacctaggatactcaccaacccagacaccctacaatggggctatagacagacaccctgtgatagggctacagttatgggacgtctccccaggactgtttctctattaaatccatgcccattgggtcgggagtgccctgtcagtagagagagtaccagagtcaactcccagtccaagtgaactaggtggctgcttgggctggcccctggatccattgctggagggggctactgaaccacgggcaggtagccacaagggcaatcctggatgagcctcgaaatttgtaaccacccaatggattcaccttgcccactgcttagacagagctgatttattaagacaggggaattgcaatagagaaagagtaattcagccagagccagctgtgcaggagactggagttttattattactcaaatcagtctccccaaaaactcggggatcagagttttcaaggataatttggtgggtagggggccagtgaatcaggagtgctgattggttggctcagggatgaaataacagggagtcaaagctcttctcttatgctgagtcagttcctgggtggagaccacagaactggttggcaggtccaggtggggccgtccagttggtagaaatacagaaacctgaaaagacatctcaaaaggctgatgttacctttaagagtaactggggaagttgcaaatcttatgacctccggaataatggctggtaatatctagaattccagcccctctcattctaacttggtggctggtggcctttccttcattttataagaacagtttagttttggggaagggctattatttaaactataaactaaattccttcccaaggttagttcagcctacgcccaggaatggacaaggacagtttagaggttggaagcaagatggagttggttatgtctgatatctttcactgtcataatttccttagttatcattttgcaaaagcggtttcgggaaggccattgtttgcacagtattttcatactcttaatttgtagctgcatatgtttgcatgtcttactttttaagtggcaggagttttgagtctagggtgtgtctttcaagtttctttacagaacttagaaataatggatgtttaataaacgctagatgtacagataacattcaagctttctatgcatctgtctttcatgtttttgttgggatgtttttcaacagtctggagacctcttaacaatggagtgaaaggctttgaaaaatctctaaaagcctgtataaatgcaaaagtattttaaatttacaggaggtgctgttactactaatactgtgcaaatttatgagtagttgtggaaataataactctatgagcaaaaatgcttctatttctgttttgttctttgcattgtgcaaatatagcctatataaatcaaatttctacatttctgcatcctgtgtgccttaagacatatgttgagatatcaaaagaagaaaaaaacatataacaacctggaatcacaaaaggctgaagcttaaagatcattatgttcagccctgccattgtacagacgaggagactacgtctaacggacacaaaatgactggcctaaggtcacacagcaaaatagtaatcttttttctgtcattattcgttctctgaaatatgtgggtgtgtttagtattgttgacatttccttggaaaaagaacaatttttaaaatgaaatcttttctttccagggctagagcaatgtatcttaggctcacttaaggaagctgtagagatgagcccaaggagggaaaccagaagagccccccaggctcaccagttgtttgttggctccctacaaacatgtcattcaagtggctaatcttacaacagcacaaattcatctaaccaggtgagtttcttcgagtcacttcaaataattatttcttgagcatctacttcatgccaatggtgtgctagattctataagaaaataaatgtgaattactcacagataaaaataaataacaatcaggctgcgtacagtggctcatgcctgtaatcccagcactttgagaggccgagtggggtgtatcactggaggtcgggagttcaagaccagcttgaccaacatggtgaaaccccatcgctactgaaaatgcaaaaattaagtgggcatggtggcacacacttgcaatcccagctactcaggaggctaaggcatgagaaacgcttgaatccgggaggcagaggttgcaatgagccaagatcgcaccattgcactccagcctgggcaacagagtgagactccatctcaataaatgaataaataaataacaatcaagagaatagaatcaatatagcccagtggacaagaccatggattatggagccagactagctacttactagcagaatgattaattttgagcaagacccttaagctctttgggagtcaggttcttcatgtataaagtgtggcttacttaatagtttctgtgaagttgtgaatttaacaaatatcaacctccttgccaaagctaactaatttgctaatcactgattttgcaaagcgtgttgtggagatgtggctggacaggtttgccatcagagtcgatataccgttgtattaaaaacaagataaaaaagctgccaagttctttcgtgagtggttggttagtctgaaatctttgcaagatgctgatgctcaagctgttgacctactcattgcctactttaacaactgtcagagaaacatgatgtggggtaaggaggtgctttttaaaaatcattcatagacttctgtaaaatgcaagataaagttattttaacagtggaaaaaaaacaaatatcaggtgctttcagggtccaacatataataagtgctatagttaacagttattttacatttattatctccctgggtctcaccctaagcctatgaagtaggtagcattcaccttttatagaggagtaaactgaagttaagaggtcaagtagcctgcttaggtcaccctgcaaccagcaacagagccaaaagtcaagcccaggtctgtctgacagccaggcctggcctcataaacactgttctgtgtgctgtcctcagacacaaaccttgctctccagaaagtcatattctagaagccttattgcagggctgaaaacactaagtgccactagagagatagaaataatgtggatggggatttcacaacagggcctgtgggaaattgtttccagcttagaaaatcagagggagttttaaggaagaaatggaatttgagtcttgaatgatttatttgtgcagaagcaggagtgagaaaggacaaacaaaaaaccagggatgagaggggtgaggtatagtttggaaacaggcaatagatggttcaataaaagtggaccctgggatatgtgcaggagagcagggaaaggtgaggcctgcaaccctccctaggtgaagtcagatcacaaggggcctcaagtaccaagctaaagagtgtgcatctaaaattgaaggtccttaaatagctttttaaaagacaaatgggcgaaaagaccaaatgggaaaaaggaaaaaataagacctaagactttgagacatggtgattatttgtcagtaagaattggcggaatatgggcttattaacctagttagttctcttctgaaaaagccacataggttttacagaaaaaaaagttgattttgcaaacaacatacttgttcatttgaagagttgaagcattttttctgaaatgtgatataatttttatatttaagttaaaatgcaattataggtatttttccttgattggataaaatagatccagaatttaaattttatttgtgaattgttcccctccttccctccccctctcccttccttccgtccgcttgcatttgtgtttggttcactcctctctcttagacaaaaggtattttctcatttcttaatcccaatttctccttcatgttttgagtgctgttttatgtttcaatttcatatttattgtaatatgaaccctcagccactaggacatccaacatccctagaatggcagagttgaaatgaacagtagagatgatctattctaacattcatcttacagctgagacaatgaaggctcagagaaagaacatgactttttcaaaaacacagagtgagttcaaggcagaagtgggacttggacttgttttctggctcctttctagtgctcatttcagtgcatcatctgagcacatgtgtaggcagggctctgggcctttaccttcttgagaatggtttagggagtctcaatagacttctcatgtactgctgcaggacttagaatctatgaagtatttagagctggagggaaccttaagatcctcaaattctgcatcgtcctggctatggtctaaatggtccctccaaaattcatgtgttgaaaagaattccccgtgcaacagtgttgggaggtggggcctttttgggagatgtttaggtaaacagattaatgccactataaaagggcttgatgagagtttggcccattttcactctcccatcccttcttcgatgtgagaacacagtgtcctcccatctgaaaaatgcagcatcaaggtgccatcttgtaaacagagagcagccctcaccagacagctgaacctgctggtgccatgatcttggacctcccagcctccagaacagtcagaaataaatttccattctttataaattacccagtctcagcaattctgttaaaacaatacaaatgggtgaagaaactccttttgcagaggagaagaccaaagctgaaagaagtgaggggagacctgcttagcttatgtggctagagacgtacagagcaaggtcagggatttcaatctgctgactcgaggcccatgttttcactctgtacatgctcatccttattttcaaagtctccagttcaaaaattcatctctttgcagtcacatatactgaagggaattctgcttcacaatgcctggaggagcttcaagtggaatgtgtccaaaccaggaggaaacaattcccttggttctcctctggatgtcagtgcaggttggtgtgcagtgaaggtaggggtgtggaaagctggccaattccactttacaagttctttattctctcatacccgggaagtaccacagctactgaattcttggtgaaaccagaacctaaaacagtaaaagtggagttgggaacctggggaagcaatactcaaccaagccaaaactaagattgcatatttacatagaatggctgtagccatgttgttcttcacactcacaaagtgaacacacagctcaaggctcagtggccagactatgtggtgggggtgggatgtggcaagatgtgcatgcatgtgaaagaacagtgtaaactctaaaacatctacaacagggaaaagcaaaaagaaatccgtatttctccctctgattatcttggtctctctcttctgtcatggattagacccagagaagaatactagtccaaatctccagcaactgttcatcatttttaacctttcctgcctggtaaaataacctgggagctttgaaaataatattgatgcctgagcttcactcccagagattctgatttacctgatgcagggatgcaggatggggtctacaattcataatttttttaaaactccccagatgcctaatgtgcaactagggtggagaattactcaattaaactatcaagttgctttccctgactgctgggatcccttccttggctgctgcaaacaatgttgtagccacttagggctaaatacacttataatgtggccttacactgcattcattcaatttaatagacacttgttgactgctttccggtacatggctaggtgaactgcagtgggtacacaggtgaatgaaaatgtccactgctctagaagagtttatacaaataactgcagcttagtaagggagcaattattttacccaagaaaatgctaaaggcttcatgcaattgaacctttaacatatagaaacattttttatattcatagaaaattcatttgttaagagaaacctgcctaatcgaaaatttgctttgataagtctaccatggtatacaaacaagccgtggactagtgcctaggtttgaaaagtgaaagcttctctgcataatagagtgagagcaggtgatcagcactaaatgctgtgtagggaaatggtcaaaaggacacttaatgacttttagagatgggatctcaatctgtcacccaggctggagtgtaatggcatgatcttagctcactgcagcctcaaactcgtgggctcaagtgaccctctcgcttcagcctcctgagtaactgggactacaggcacatgccaccacacccagctatatatatatatttttaatttttttgtagagacagggtctcgctatgttgcccaggctgttctcaaacttcaggtctcaagcaatcattttgcttcagcctgccaacgtgttgagattacaggcctgagcctccatgcccagccataaggccatttttaataagaactgttaaaaataaaatgtcaattatggaatgtaaacttcattttcacatttattaagaagtcttccataaaatacacattgctcattattcagtgagagtgaattgtgtatgaaaaattcgaagaagtgctaaatcccaccttgagatggcagaagaaaaccagagggtatacatggggcaactgcctgatgtgtgggtttgctagattttacaattaaaattgcaggacacccagtgaaatttgaatttaaattaatacaaatcattttttactataaatatgttccatagagtatttgcacacacttatattaaacaattattcatttggtttgatgttttttctggcagccctattatgggttatggttgggtagggattttataatcagagagggagacagggaatggacaaagatgcagaggaggtagagtgtaaggtacatttagggaatagggagaagtagggttggagtgcactgtcaagtgtgttggaagttgtctggacattaaagtaggaaaataaagctacatcctataaggccataatgccaatatcaccaatttgttactctgtcagcaatggatagccctttgatatattaaagggagggaaatcatatgctctattcatccattcatctatccatccatccatccatccatccacattaatgtatctgtatcaatatggcacacttgaaaagcatatgtcctctgaatttatattctagttctgctatatgctcactgagtgatcttctgcaaattactgcctctctcagcctcagttacctgaaaaataggcataattagatctacatcttacatctctcatcaggtttatcacagtgacatacaattgccaagcaggcaagtccaccttgaatgcctttttgactcgtttgagggttccaatactgtgtgtgccaacttagaccattatttcccagaaacattcctcttagtctatcgatttcattcccttgcaatgcactggcctttacacctgcatagtcaacagtgattaaagacagcatttctgtctctcctgccacatcggtacatttgtgtataggtaggtgttgctatttgtgtaacgtattacgaagtgttttcatgttcattattgtcattgaaccttcagagagatcattctgctatcatgggaggatgttggaagtgggttggggtagagagattgggggtagagagatgggttggaaggctgctgtgatagcccaggcgagatgcaatgaagacctgaaccagagtagtggaaaggtgagctgaaagtgaaaggaatggatgaaaacaaacggcacagaaataaaaacaaagggaagttctgacacccgcgttttggtctccttgacattgcttccatttcctctagggacatgtcctggataagggtgaaactggatgctccttggcagtttcagatgtcaccacccctaactttccattggataaaagaaggcccaaaatagcctctggtcccataggctagtgattactgggactcagattcctgtcctgaaaacacggggaagaagccaggcatttgcccacttaccctctcaccagctgacccagggcattagcaccctggtgcctgctgacgcagagcatctgccaaattcgattagccccgtggcctggctaagctgggcatgtcctgcactgcttctaaaacaagccctccaggaaggggctgcgagactcggagatgttttttcctactgtcaagcaggaatcactgcttggcagtttgaggtagggatggggaggagataaaaatattagaagatgcagaagataaaaccaaatactaatctaacagtcacttctgaaaacagagaaaacactccaaacagtcaacatggattgtttttttttctctttgcttcaacttagtaaagccctttggagtccagcagaatgagccaagcagtgtgaaatgtgtggaaacatgttgttggctcagagcaggttgcttggaggcgggacaggtgacgacctgcctgtgagaagcccatagagctctcttctcctcaccactgggtcagttgatcctcatctgtagatgagagatcctcatctgtagactcagccctcctgcagccattagtgcctctcctgtttctaatcacagggaatctaaagaaatttaaggagcctcgttcaggagctcagtgttagattgagctttctggtgggtccattctgactctgaatgttgattttactatctaaaatcattattcttgtttctatggctagggtcctacttgtattcaatttcctatagaactagcgtcctgtcttgttaattcccagtcattagaatcccacacccaagtttgggaccaggttagggctctgagtcccatgggcagaaatctctgatacctctgactcctgtttacctagaggaagaagaatctggagcagcagttctaccctggctggtcaacaaaaccactggaaagatctttaagaaatacagatgccgggcgcggtggctcacgcctgtaatcccagcactttgggaggccgaggtgggtggatcatgaggtcaggagatcgagaccatcctggctaacaaggtgaaacaccgtctctactaaaaatacaaaaaattagccgggcgcggtggcgggcgcctgtagtcccagctactcgggaggctgaggcaggagaatggcgtgaacccgggaagcggagcttgcagtgagccgagattgcgccactgcagtccgcagtccggcctgggcgacagagcgagactccgtctcaaaaaaaaaaaaaaaaaaaaaagaaatacagatgcctgggccccacccccagagattctgatttacctcgtctgggtatagatatattttttaaattccctatgtgattcaaatgtacaggtcaggattgagagccaccagtctggtggttaaaattcgagaccttgggattatatagatgtggcttcaaatctgactatatcatttattaactgtatgaccttgggcaagttatttaggctactgtgttgtcagttttcttgtctctcaaattacatctatctcatgattattttagatagcatggaaagcatttagcatggcatctggtacaaaatagggatgtaacagtattgcctattgccaaacacttgtccttgtgttcaaccaattgctagggtaatcttaccctttacttgatttacatatgattctttgcatatggatcgtctgtctgaaacccatcgatagaactctttatactcattatagaacattcttcaccctttcgcatctaacttctgctgaactcaagggacacatcagtcctcagcaccttgactttactacctgatctaccccatcaccaatgggatctgttcttaagaaagtgggaaagccaagatagcaaactgagttcatcttttggttcaattcaattcagttggcagtggagcatgaccttgacatgacttgtgaggctgaggtgcagcaaagacttacaagtgatgtcagccatacatggaagaatgggggagagaaggctggcgctggtggccagggctattgcagacccagcaggcctgagtcattatcctttctcttctccaccaatcccaaacacaaaataactgtaaagtattgacctagggaggattgggcactcctgggtcttgcaagtggttccacaacactctgcctatctgcccaatcccagcaattcacaggaagctcatcagattgtccatgaggttaaaggggtgacaactgccccatatccaagtattggaaatagctgacatgaagctctagaaaccctacattcaggtttttcagcacagagtagggttgtatccacttttggaaaggcctccatgcaatgaaagactgtttgcatgttaaccttaaaagatcaatccaggactcttctgaaagctaaaaattctaagcaccactggtggtctccctttttgaaggaagccaaatcccttggacatgtaactagctattccacccccctccccacaaccacggccttttttttttttttccttctgtatgttctcaatgccctttgcacttttaaatttttcagtggtttaagagtggctccagatccaggctgccctgctactcacaagtgttgcagcctttgccaacttaattgaattctctgtgccttagtttttttcatctctaaaatgggagtactaaaactaccacctagtttatggattgttgtgcagtgagaaaatctgcataagatgccttgaacactgcctgcttatagtaagtactagtcactataattgtgcaatgggttaaatgtatgtcaaggacatggggcagaagttgaggtaggattttcctgatgtgccatgtctatttttagaaatgtgactgtggccccttgtttctttcagactatgtgagttcatccatttcaccctggcttcagtcattgccattcagctgggatagacacttaggaataatgggcttcatttggaatgtacagtctagaaaaacaccctttattgtagtatatctcttccatttgcttgagtgtatgtagtggccacagtttaactgccaagcagtattattgctagtgggtaaacaagagttatctctctgagtcttccagaaaagacaaagtgaccctggatgctaatggcacagatgagatgggatctcttccaggagtctgaatatgagaaaagagtctctgaagtgtgtactagatgagcccagcttattaccagtcagcagagtgacttccaagagtttgtaaacattttctgaggctttctcatgggtctgtaactttcctaagtgctttatatgtattacctcatttaattgtcacaaaatcccatgaggtaagtgggaatatttttacctgtcctttgcaggtgaggaactgaggcacagagaagttaagtgacttgcctacagtcacacagctcttgtagcagagttgggattcagactccactctttactatattatgtgccccctgagtggtgagatgttggatcccagaggaagcagagctctgaggtcatcaggaaggaaagcagggcatgaagtgggagcagaggtggattgaacaaaaacatagatttctcagagattcaggcacaaaggactcagggccaggaataaaccaaagttggattgctgaaatgaggagtttcaaacactggcatgccagtgaggtttgtctcctaagctagccaaagctccactcagaatgacctctttaccattctgaaatatctgctgtttctctgaggaaatctgctgctgaatgtggtgttgctgtgatttgttatgagatacttttgttctcaaggccatcctctcaggaggaggaactatccagagtactcgggaggtggtggtgaaacagattgggaaccgtacatccttggtgaatttataaagccccaaagaacagagatgcaaacccatttcattcaaagagctctgttaacagtgactctacaggatgctaatccagcagtttcatgcagagtttcctgaccctgcaacttggcaaaacacaaggaatctctccttgccaggcaccatgtaatacagtaagaatgagtgacataaaacaaaggtaaatacattgcctggctttgaaagtaaggttagaccctggtagaaaatttgcatcttgaggaatatatgggcaccttccccaaggtattttctgcctgcttgtcagacagttggtaatatttttatagttgcatatgaagtagaaaccttcctttggtcacatcctccccaaccgccacactaacccaaggtgcctcctgcttttaatcttgtggcaagtaccatgatataaggacaccagctatggagggaggcaggagatgcacagtgaattatctcagaatgcttcccagcctttaagtgcttcagaaacctctttaatctctttttatggcaaataatgaagtaggaagaatgaaattgtaatattaaaactgaaatttacctccaagaccatcctcttgggagatcccccaagttcaccctcttcctctgacagttgagggcatggaggttcagataccggaaagggttggccaacctgatgattgaactaccaagatacctggctcccaaggtaggcttgttagaattcaggcttctgtattgcctaatggatgggtaatacatttggacaccctcccctccatcctagaaatagaaaaatcttctaatgcaatttgccttgtaaaatgtgcaggagtgtgcacacacacatacacatacacacagagatgggaatagctatgttcaggtcctcatttccagaaaccagttcctacaatatagaaaagctttgccacaaagtctgaggaagccctttgtatttatagtctggtcattctagaggtgtgaacctagatttcctcagctggatgttaatagctgattaattcaggatgctgatttaatttgtgacctataaaacgctatttcacagagaatgggctgtgttggcatgtgcagagaccagctccccagatggaataatcttttccttattaatttgctgcatgttgcttctcatttctcacagtcgttccaaatgtgttacaaacgactacgtgctctgggtcctgaatccactactgctgttgctttgaaagaaaaaaaaattgttgactatgaagggcactgagctttcctggctcacatttgcatgctcactttcaaaccatcagtgcactcttctcttacaacactaagccttgctccacctgcgagcacccatcacttttgtgttgtttaggaaatgcaaacatagatagtttgatgttttcagggccaagcaaataggtagtgacatgattgggatcagatctacagtttcaaattcttgggttgtgctatcttcctattatctagaacatgtgaaaggctgtttaatccccttagtccaatgatcctcaaatttgagtgggcacagaatcacctagaggggttgttaaaactcagactgttgtactctacccccagagcttcttatttagtaagtctaggatgggaactgagagtctgcatttgtaaaaagttcccagagatgcagatgctggttgcagaacacactttgagatcattccatgagtctaactggaggagagtatgggtactgttatctccaagtaaacactgcttggtatctgttggagcaggtctctgctgggtaaggtttctattttatgtctttttcctctttccttcctgatatgcaccaaatcccagttgagcaactattttttaaatgttagggctcaatggagaatgcagcttcactaaataaatttaaatgtgtactgcagtacttgacatggattttttcaaattgtgagcacttaagccagacaaaaatatttcccctgggttcagccattctatgcagaccagcccctggtttctaaggaaccatttgaaatagagtacagtaccaaagtgcagagctgcagaagcatctttatgtcctttctaaatgtagaacatacacctcaagctcaggatttcaactaacactttttggtcatttacaggcttgagacaagtcctgtcattaactacaacattatgtgtgaggcttttttcaggacagataagcttatttttctaaaggaaaggacttttgtttttccagatataaaatagcagctcacacttaaatgcaaaggtcttgtttattgtttgtgtggtgaggtttaattggaaggcctgctttttacaattccatgctactgacattaccaagcacacaggattgttgttagaaaagcaaatgccaggctggggagctcctaatctggtggtctgtgccttgtaaataattagggtgtgggggtgaggtaaaggcctatggaaatcctacagagtgccacagaaatgggtcttctcaattatgataatgtgtaagatcacagtgctttttctgttaatatttaaacatagtcttcaagtaatttactgcaaataatcacatattaaaaagcaaggagtttgcttttttttccctacaaataattcaaatggtggccagaattgagagaatggatgatcatactcacaagattggggatagacatgcaggcagtgtgtttattagaaggaatgtccataaacatgggctggtttggagtggcttcacctactctagttgctaagtttagctattaggtggggagttcaccaaccaccagttagttcaatgtaaccaacaaaagtcagattcccaaccattacccccgcttgtcaccaaaccaagcagccaaccaacctttaaaaccacagtttaaaaacccacagctaaaaggatggcctatgttccataaaatactaattttgctggtcaacattctgaggttggatcaaatctgtgaatggctttttgcaagctaaatgcttcatcttcctaaatttatgtacacgtatattgtttcttatcccaattaacagtctttatttaacaatggcttatcaaaatatgcagccatttctactttaacttgtagaccaggcttgatgttagaacatgatggagacaagtatgttttacaataaccttaaaccttaacactattgggagtgctggctgaactgaggcaatgcctgaagccatttgttgcagttcaaaaagtgtttgacattttatccagatctagaagtcacttaaatgaatgaggaacaatttaacactgacccattctaagacttagttcagattctcatttcgaactgtcttattattcactgaattagtacagctcataaaaagatttcatagacacagctaatgaccacagaggcttatcagtatggtgaaaaacaacagatcaaagcaatgatctgagttatttcctggcatcttagtaattaaacaagtttaactgcttactcaatgaatgcagtacacattggttactcctattaactccaagtaggataatttagtagatgtctctattttgtttttttctccaacctcatcttctaatgaaaactttcagtcatgtttaccaaactcgtttaacttcaagtaatttggatgtcatgtttaatttttactttttttactcaaccatttaaaaaatattttagtcctctgactatgaaaattggtcaagcctgaagtttatcaaagttctaagtccatggctgggctgtcatgactggcagtcaagggcttctcttagagtacttttcaagttcactggacagattaggatagagtaattcatctcattcgatctgtttttccatatacacaacacaagtcaatgtttgttatgactttcctgatccttatttataagacaatacaagaggaaaccatgtgtgtatgtttagaaatagaaatgatacattgcacagatatagttcaccacgttatgggatgggttgtcagtgttcaaatggggaggctgaagagtaagaacagatgctttttttccttaatggccccttctctgatttaaaatccttccatttatttccctaagatttagtgataactttaaacactttaactaaattacccagcggcttggcagccatcacggaggcaaatccttttagaaatcctagcaatctgttagattgtgggtactatgatataaaatctgtgtgctccacgtacaaaaattaaatcagtgctatggatacaaatacatactgcaaatggcaccacttccaaaccgaggatatgtgacctgtctccaaatattgaatttctttttttacttttttccccagtacttgactttctaaatttgggccaatttattctcattatccctaagtaaacctactttgattttttttaacagttattttatagtcaaatagagccagccagccagccgtgattcgtggatcctgatgttgctaggatacatggtttggtatctgatgaaagtatatcacttcaaaggggtaaaactttcaagtgtccgagaaaatgacactcccatcttccaccatggaagacagatccaatcctacaacttctcagaagctcacagactgcaggattggcctcccaggctttcaaataagtatcctctctggagggctgtttaattactaaaactagtcagattagtcttaaagcaaggaacacacgtatttataataaaacacgttttcatgtttgttttacagtaaagagaaaaaaacccagaacccccagattttatgtactttgaaaatatatttaaaaacattaaaaattctatatttaaaacatatattatatgttaattagtacacttaaatagaacttgtatttacaataggcttctgatgcggttaagttttaatgccaatttttttcaataacataattatataaatatactaaaatacaataaatattgttttttgttttacatggtgaataatatctttaccatagagagaacaaggccacagacatttacttacattttcaatgggaatcgccataaaaaagcaacaggcctgctgccatgcatgaaacacttctgccacaaagagaccacagcaagactttaaaaaacaaaacaaaacagaacaagaacgaacacaacagagagagattttaacaaaataaatcttaggtcaacataaaccatcaagcatgtgactgtgatgtatcttattgggtaaaagagccactgaccacacaattgctggatgtgtctcctatgaaaccacttaacagatctggcccttgcaatcctttaagtttgtgatggggggttgtttgttttaaatttgtccctcaaaaggaagctgcataaagttgacatacagcagatattccaagcattccttacatattaaaaataattacaaagataatattttcaaacaacacaaaacaaatctacactacgtaaagtcttccttctttcaaagaggtattcagatggtactgtgaaagactagctctaaatgaaagactgaacaaattgaaattctttgctgatggtatcttcattcctgggttatggtgaacatcctcttttgcttatccctcaccctactaagatgcagcaattgcttggggctttctgatacttaaggatgctggtccaagtggtgatcactaacattttcaggtgtgaaatgggctgaatgggcttagagctctagttttcactggggatccatttttccaagaaccactatttcaggctcccaacttgacttctcctaacccaaaatggcagaggtgaggcagggaccctctccatgaacagacaggatgggcagaaggttgctgtggccttcactggggagcaaaattttgtcagctctgtcctggcctcttccattgagcaaggcaccttcaagtcttggtgttctgaatgtccagacaccttcccgaagtcttgtctctggacaagatttcctatgggtccccttgatcattcggcctgagtttggggtttcttttcctgttcccttttcccttaccaaaagttctcaaaagataaaccctggtttcctcaagtctagtttcaaagcaataagtgttcaggtagcaaacatcttctatctcattgcatcaatctcatgatcacaaatgccacatttggctcccaacctgctccaggctaatccaattttatgcaaaattatccagaggtgggatggtgggcataagtcggcttgagtgtggtcctccagtcgagaacctcttgagcacagttagataatgtaggcacttaaagcacgaggtccaagcagcttgacacatgtcattccagagccacctctgaagggtccttcagaggccttcgttttggaatgtctcaaataccatgccccacctccacctagaccttgggatggccactcagaaattcctcccgcactgccggtaaatgcaatgccaactccacatagcctccatttggctgttcagtctcatgtcactggcaatgtggattcctgttctgatctaggtgtttctgggttgatacagggctctaccttttgcttacaagacattgttaagcctcaccatgagttttttttaagcttagccatgatttacccaaatgttcactcctcataaaaaataatcttcattttggggttattttttgttgttttctgttctaaaaaaaaatcactgttctccatgcttatacgagtgtcatgatgtgacacaatgtgttcacttgttcacagcagtggtaaaatatttcagaacgcgcaactgatttttcttccttaaaacaaaacaaagaggagaccagagggggagggggggaaagaatgtgttctgagcaaacataggtccttccgtcaaaagcagcttactctgaccaacgcccaaagaatgagcggggcctgggaggtgcatcacgggatgtggagtgtgagcatttttttgttcagttgccttaatttttattcactttctagtcatctgatcgatattgcaaacatcttcacaacatacaaatgtatcttttatcagccagaatatatattgtaggaattctttccccatctctactccctgtgggaactaaaaaacaaaacaaacaaacgaaaaaaaaacacaaaacaaacaaaaatataccccccatcccccatcccctaagccagtaaagcaatgacaacagcaccttgacattgttttaattccaacgctatcagaagttaaaagcagtaaaacagatatagtactaacaagaacgaagatacttactgtctaaaatgtaaacggaatgttttggttcaaatttttgttgtgtgtgtgtgtgttttttttctgttttctgaaagaggacagtttattatcaattcacaattaaagcagcatgcaatttattattttttttaactttttatgttttcagttcttggcaacggcaacaaaccacaacattatcaaggaatgtaatgcagactttttaagttgtgcgcaaatgactgtttcccttctggtcatggacatgtccaataaatagattgtagaaccactgtactgtataaacttcatttatacatgcagttcataaaattatttttttcttaactgaataatttaccctgttatgtatatatacaaatagataatttttgtctcaatataatctaatctatacaacataaatccactatcttccccttttaatggtcaatgtacatacacaagaagtgtctatccttatgaatcgccagccaattctctttttgctatccatggtaagggcccgcacgtacgactgggtagttcggcactgggagttccaatgccttttgtctatgcccctgcagccttcttttgtgtaacccatgggattgcacttggtctcgtagaagtattgcttcagttggccttttgatacagggaccttttcaaggactgtgaccgtcccgcccgacatgtccactgcagtctttttgtctgctgccgttacccactcactaatactgtcacacacgctcagctcccctcggcgggcagggtcagagtggcgccggaccctcatggacatgtttgcagcatctaggtaatttttgtattcctccagcagaaagagaagaggaggctccaaaggcacttgactactgagcatcaccctggacgtgtacaagtctgcgtccttattgttttcttcattgggccgaactttctggtcctcatccaacagctcttctatcacgtgttcgaaagtgtcagccaatgatgtcaagcctcttgaacctgccttgggcccattcacgctctccagagtcccatgggtccgcacacctgggtaggccaagccaccttgtcctcggatgtttgcttctttcatgggggcagccttcatgcaaccaaagtatgaaataaccatagtaaggaaaaggatggtcatcactcttctcacctggtggaactgtagggagaaagcagaaacaagacagaaaactggttagggctttctttcaccgggatgccatgtggcccatctgattgtaattccaggccattctgcagggtcaaggtttttttatgtcttggtgataaactccagctgcaccagacacaaatcagtgtcagtagtgtgctgtatgtggtttaatataaaccagagacatgcagtgtttcccccaagatctagcatataaacctgagattagatggcttctaagcaagtgcaaaaattgtggcttcaagttctccttcttcccactttagcagctttgtaagtttaatttttaatgatctctgctcatgctgtcacgagaaacacaaaatcataaatgttactaagcaacaactgcaagtgtaattaatagtaatttttttcaagttagcaacatggtcctttgcaggaatgtgtgacaggaacagcagtggcctgaggggtctgatgggcctttctagctatgtgatgtctaggcatgaatagcacaataaaacagcagttggggaactataaggagcctttaaattgactttttttttcctcttcccacagagatactctattatagcaaagaagaaagataatttcattgagccatcctgttttacaggtaaggaaaccaaaggccatagaagacttgccttatgtcatgaagaaagtttatgttagaactcagggctcccaattccactgttctttattctacacctgggtggtcacaactgaaaatgttttgcttatttctaaacagaaatcattttttgacatgttcattttaatgatgtgtctatgcctggggctaatgtcatgaaaacaatgtgtctggtaaggagaaaactgaaaaagtcagcattaaaaagacatttaagtccatttcaaatgcctcccatatgcagactccactttatctcctccagttctctaaaacccttcactccttggctttttctggctaatacacacatctagctaagaaagctcaacttttctttttactagagatgttctctctgtgtgtgtgtgtgtgtgtgcgcgcgcgcgtgtgcgcgcgctctgagtttatcctacttttaaaaagctgagtggtgttttacacattttggaataggcagctagtgcttctttttctgcttttgaagtttcctgggaagtcccttaaaagcataccacaaaattaatctcttcctgtttgccagagggttgctctactctaaatttggctctacatctacaagcatgctctaggaagccaattaaaatggatgaacaagcaaaatgaaaacatacctatggaccaacccaaggttaccgtcaggtggtgaaggacttcagaatcacttacctgaagcattgtgtttctcagcagcaaagagtagcatccccagccctgaccctaattttattcctacttctcagttctgaggcatggacttacaaaaagacacatacatgcaatggccatcatgatatccaaataagtaggaaaaggaactgtgtttctgcccatgaagttttactgaattcaaaggcaacctacctccagtcaataggtcagaatgcagaaatggctgaaaactctggtattgaaaagcaaatgttctccacttttgtaagaaataacattttcaaccactaagagactttattaccatccctaaacacacaaaaaaatttcttttagatttactctcactttgcacgaatagcaaacatgcttagaactgcttagattgcacaatgttctcagattaggaagggaaaattggtttgaataaaatacagatgtctattccgctaacaactaaatctttgtgaatgttctgagtcctgtaccatcaaagaaatagatcgtccatgggggtttctatttctggtagattgtacttacacactgaatgaaaaagctttctcctaatattcccagtccaaataaaaacaacccaaggggcacctcttatttaggtcaataaaagtttgcaaatgtggaatactttagccatctacatcacactggtagagactttctgtgatcagctattttttaataccatatttaatcaaatctaagataccatcattgtgaaactcgacattttatatatcactaagaaagcaaaaatgcagcctgggtgaccagagtgaaactccatctcaaaaaaaaaaaaaaaagaattaatgaactatagtttaatacatatttactaagtgcccacactaactacttaaaaatggtccaaaatactgaggcatcttaagctgttggaaaattgttttgttttcaccactacagtaatgagtctttgaatgataccattttctatacttggcttctagtttactctgcctttcactgatcttatctttttattaataactttatgagaaaaataattaatgctttatatattgttctctcagttccatgagcaaatatttcagagggaaaattggcatctgagtaaatattacttggctttcattctgaagcccaaacatgggtattcctcaagctgagcatctgcatagaattaggaattaacacaatggtgacaaagtccaaccccacattgcaagccctgctctctgagtggcacttctgcaattctaactaactgtctactcacttgtaaggccttgaagttaagtgggtgcaacaccaaactcaatactttttgttggaacagtggtatctcctaccttttctaacaatggttccctgatattttgggcaacccaggcataggatagaaatcctggaatcaagtttgacaatatatttcctgcatagccttccaatccagtcagtaaagatgtcctgttaatttttcctttaaaatatttgtcctggccatccctttttatccatcccactgccaccatcttggctcagccctcaccacctcattttgtgaccacaacgtcccgatgctgtatcagacactctttctgctccattcaactctgatgaccacttcctgggtaaccaccctaatactattctcttacacaaaaactggcaatggcatttttgttctatctgctcaaatctaatgtcttctctctgatactcaactctctccaacatctgccctcacccttcttagctaactttctcaaactactcaatgcttcatcacttctgctccgatcaggacagagtccttggagtgccgtacacattactgcctcctgacttgttccattcctctgacaaactcctctctccctctcacttgctgccaaaatcttgcttatccttcatgatccagttcaagcatcaaatcatgcatgcccctttctctaattactccagcatacactgccttccttccctaaaattccacattacatcttacgtagtacttgattcccttctcacttgttttgttttgtttttttcccaagacagagtcttgctctgtcgcccaggctggagtgcaatggtgcaatctcggctcactgcaatctccacctcctgggttcaagcaattctcctgcctcagcaggaggtagctgggattacaggcgcccaccaccatgcccggctaatttttgtatttttagtagagacagggtttcaccatgttggccgagctggcctactcacttgttaattgttaaccgtatttgctcattctagtcagtcttcagctgaaaggtaagttctttgagggaatggatcatgtctgagcccccataatgcttaacagagaaaaatgtaatagcagtactcagtaaaaacttactgataggtttattaaactaagagaaaagacagtttggatataattttcgtaagaagccttttcatttggaaagatcagtgaacccattgaaattctcaggtaaatataggctgtgctaaccccaaattataaactctaaggcagtggtcccaacctttttggcagcaggaaccagttttgtggaagacaatttttccacggtctgggagtagcagggtggatggttttgggatgaaatggttccaccttagatcatcagttaaattatcataaggaattggattctcataaggagcacacaacctagatcccttgcatgtgcagttcacaacagggctcatgcttctatgagaatctaatgctgctgctgatctgaaaggagacagagctcagatggcaatgtttgctcacccgccgctcacttcctactgtgcagcctggttcctaacaggccagggactggtaacaatccatggcctgggtgttgcggatccctgctctaaggaatttgacagatagcaattatcagccatgaccaacttcttgagttcctctaatggaataaaaccttacttgaataattaaaaagcagataacactaccacatactaactgtcctacaatttcctgtgtagctctatttctaacagatcaataagagacttgggaagtaataacaataataatagcaaaatttgtagttttcagccttttaacttcttgtttcttattctgctaagctttcaatgagtaattttatatactgtattaggaaataataaaagattaagtaagagcttccaggacaattcttcattttcaaccttcggatgactctttatcacacataagataaagaggctgtgtaatattgctaagcagattatatatttatttatacttaataaattcattgatgctgtctaattctgctttaaggcttacagccattaattcaaccacatctataaaatgctaggaaggctttcatagccccactgtcaggaaattcaatatagtacatagaactaaaaagaaaatcaatgaagtagatatcaagtttagctttaagtgtgactcacaagtcttagacatttcactgaaagaatgtccataacaacatgctcttttactcttgctgtagtcataacttacatttgtctaagagactatagaacattcacaggcgtcatctaatttgatttttacaaggagacaggatgggtattattatccccattatatagatgaggcaattatgcgtcagagaggttaggtaacctgtcaaatgccataaagctagtaggtcacctgtctcctgaaccaagcttttaccatcaggatgtgttgccagttttagaatatcagccacagagaagagagtggctgtgacaacgaaggagcttacaaaatgtggacactgcagctatgtgtgtcctggaacctaactttctaaaaggagtgccattaagatactactttgtaggtctagattaatcatgaccaagatccttcaactttaaggcttgattacttaaatggatgaaatttcagacaatgtggtctttttctaagagaaagaactgcaaaaattgtagcatgttagaactaagtttctatggccaaaggtgggaaaacaagcaacagtacagataattcaggcatacagaaaaaaaaaaaagtcttgtttgttcccagcccctttgggttttacctgtgagcgtgtaatcagagaaaacacagtttaaagatatggctgctcattttagacagtcctataaagataatggtaatgctgaagaagttattaatatttggttcctaacatatatgatacaaactattaagagttgaccttaatgaaatcttgcaaatcaatatttaaaaatttttaatttgcatccagttgactatatccatatgttagacttccttttgttcattcattcatcacacatgaagtctactttccagtcttacttacctccctccctaggagggaggtaggacatacgtaactagaatataaaggtagaaatgacccagaaaaggtacagatacaattttataaagagaaagaagttacttccagttagggaataaaggaatgcattgtcaagaaggttgcaaagggccaggtgcagtggctcacatttgtaatcccaacactttgggaggccgaggcgggaggatcactagagcccaggaattcgagatcaacctgggcaacacagtgagaccatgtctctacaaaaacttaaaaattaaaaaaattaggtgtggtggtgcacacctgtagtttcagctacttgggaggctgaggtgggaggattacttgagtctaagaagttgaggctacagtgagcgattgatcatgccactgaactccagcctgggtgacagagacactattgccctaggaaagcaactgttttgctgtaatcaatgaaggctcccgatagccagagccacccagaattcacagtcacatcgaaccttgccctcatcctctgcctccttgtcacagagcaacactgccccagtagcacacatctccagtctgtaacaaagaagtcttagcatcaagcatactcaagccacttggatagcaaatgaggtcatctgaaaatacttttaaagtttacttttttaaaaaacagttttttgtttacaggacccaaatggcagttgacattccctgtaaaagtttaacctcttcaattagaattctgttttctttagaatttcaggtgggatctgttacaattcactgaagtttagatttgacaatgttctatctactatgttattgaaaccatataatatttaccaaattcccatacatggtagacagtgacattaattaagaagataatttccaatttgttccatgaagtttcagtgacccactctgtaataaagaacttggaaagggaggttccaagatggccaaatatgaacagctccagtctacagcccccagcgtgagtgatgcagaagacgggtgatttctgcatttccaactgaggtaccgggttcatctcactggggcttgtcagacagtgggtacaacccacggagcatgagccaaagcagggtggggcatcacctcacccaggaagcacaaggggttggggaattccctttcctagccaagggaagccatgactgacggtacctggaaaatcaggacactccccaccctaatactgtgcttttccaatggtcttagcaaacggcacaccaggagattatgtcccaggcctggctcggagggtcccatgcccacggagcctggctcactgctagcacagcagtctgagatcgaactgcaaagcagcagcgaggctgggggaggggtgtccaccattgctgagacttgagtaggtaaacaaagcagccaggaagctcgaaatgggtggagcccaccgcagctcaaggaggcctgcctgcctctgtagactccacctctaggggcagggcacagctgaacaaaagacagcagaaacttctgcagacttaaatgtccctgtctgacagctttgaaaagagtaggggtcctcccagcatggaatatgatatctgagaatggacagtctgcctcttcaagtgggttcctgacccctgagtagcctaactgggaggcacctcccagtaggggccgactgacacctcatacggccaggtgcccctctgagacgaagcttccagaggaacaatcagggagcaacatttgccgttctgcaatatttgctgttctgcagcctctgctggtgatacccaagcaaacagggtctggagtggacctccagcaaactccaacagacctgcagctgagggtcctgactgttagaaggaaaactaacaaagagaaagaacatccacaccaaaaccccatctgtacgtcaccatcatcaaagaccaaaggtagataaaaccaataagatggggagaaaccagagcagagaagctgaaaattctaaaaatcagagcacgtcttctcctccaaaggaatgcagctcctcgccagcaatggaacaaagctggacagagaatgactttcacaagttgagagaagaaggcttcagatgatcagtaataacaaactcctccgagctaaaggaggatgtttgaaccttttagcaaagaagctaaaaaccttgaaaaaacattagacgaatggctaactagaaaaaacagcatagagaagaccttaaatgacctgatggagctgaaaaccatggcacgagaactatgtgacacatgcacaagcttcagtagctgattcaatcaagtggaagaaagggattgaagatcaaatgaatgaaatgaagcaagaagagaagtttagagaaaaaagagtaaaaagaaatgaacaaagcctccaagaaatatgggactatgtgaaaagaccaaatctacatctgattggtgtacctgaaagtgatggggagaatggaaccaagttggaaaacgctctgcaggatattatccaggagaacttccccaatctagtgaggcaggccagcattcaaattcaggaaatacagagaatgccgcaaagatactcctcaagaagagtaactcaaagacacataattgtcagattcaccaaagttgaaatgaaggaaaaaacattaagtgcagcgagagagaaagggcaggttacccacaaagggaagtccatcagactaacagcatctttcggcagaaactctacaagccagaagagagtgggggccaatattcaacattcttaaagaaaagaattttcaacccagaatttcatatccagccaaactaagcttcataagtgaaggagaaataaaatcctttacagacaagcaaatgctgagagattttgtcaccaccaggcctgccttacaagagctcctgaaggaagcactaaacatggaaaggaacaaccagtaccagccactgcaaaaacatgccaaattgtaaagatcattgaggctaggaagaaactgcatcaactaacgagcaaaataaccagctaacatcataatgacaggatcaaattcacacataacaatattaaccttaaatgtaaatgggctaaatgctccagttaaaagacatggactggcaaattggataaagagtcaagacccatcagtgtgctgtattcagcagacccatctcatgtgcagagacgcacataggctcaaaataaagggatggaggaagatctaccaaggaaatggaaagcaaaaaaaagcaggagttgcaatcctagtctctgataaaacagactttaaaccaacaaagatcaaaagagacaaagaaggccattacataatgataaagggatcaattcaacaagaagagctaactatcctaaaaatatatgcacctaatacaggagcaccagattcacaaagcaagtccttagagacctacaaagagacttagactcccacacaataataatgggagactttatcaccccacggtcaatattagacagatcaacaagacagaaaattaacaaagatatccagaaattgaactcagctctgcaccaagcggacctaatagacatctacagaactctccactccaaatcaacagaatatacattcttctcggcaccacatcacacttattccaaaaattgactacatagttggaagtaaagcactcctcagcaaatgtaaaagaacagaaattataacaaactgcctctcagactacagtgctttcaaactagaactcaggattaagaaactcactcagaaccactcaactacatggaaactgagcaacctgctcctgagtgactactgggtacttaacgaagtgaaggcagaaataaagatgttctttgaaaccaatgagaacaaagacacaacataccagaatctctgggacacatttaaagcagtgtgtagagggaaatttatagcactaaatgcccacaagagaaagcaggaaagatctaaaattgacaccctaacatcacaatttagagaagcaagagcaaacacattcaaaagctagcagaagacaagaaataactaagatcagagtagaactgaaggagatagagacagaaaaactccttcaaaaaatcaatgaacccaggagctggttttttaaaaagatcaacaaaattgatagatcactagcaagactaataaagaagaaaagagaaaagaatcaaatagatgcaataaaaggtgataaaggggatatcaccaccaatcccacagaaatacaaactaccatcagagaacactataaacacttctatgcaaataaactagaaaacctaaaagaaatttataaattcctggacacacacaccctcccaggactaaaccaggaagaagttgaatctcttaatagaccaataacaggctctgaaattgaggcaataattaatagcctaccaaccaaaaaaatccatcaggaccagatggattcacagctgaattctaccagaggtataaggaggagctggtaccattctgaaactattctaatcaatagaaaaagagggaatcctccctaactcattttatgaggccagcatcatcctgataccacagcctgacagagacacaacaaaaaaagagaatttcaggccaatatccctgatgaagatcgatggaaaaatcctcagtaaaatactggcaaaccgaatccagcagaacatcaaaaagcttatccaccatgatcaagttggcttcatccctgggatgcaaggctggttcaacatatgcaaatcaataaatataatccatcatataaacagaatcaaagacaaaaaccatgattatctcaatagatgcagaaaaggcctttgacaaaattcaacagcctttgtgctaaaaactctaaataaactaggtattgatgggacatatctcaaaataataagagctattcacgacaaacccacagccaatgtcatactgaatgggcaaaagctggaagcattccctttgaaaactggcacaaaacaaggatgtcctctgtcaccactcctattcaacatagtattggacgttctagccagggcaatcaggcaatagaaagaaataaaggatattcaaataggaagagaggaagtcaaattgtctctgtttgcagatgacatgattgtatatttagaaaaccccatcatctcagcccaaaatctccttaagctgataagcaacttcagcaaagtctcaggatacaaaatcaatgtgcaaaaatcacaagcattcctatacaccaataacagacaaacagagagccaaatcatgagtgaactcccattcacaattgtttcaaagagaataaaatacttaggaatccaacttacaagggatgtggaagacctcttcaaggagaactacaaaccactgctcaaggaaataaaagaggacgcaaacaaatggaagaacattccattctcatgggtaggaagaatcaatatcatgaaaatggccatactacccaaggtaatttatagattcaatgccatccccatcaagctaccaatgactttctccacagaattggaaaaaaactactttaaagttcatatggaaccaaaaaagagcccgcatcgccaagacaatcctaaaccaaaagaacaaagctggaggcatcacgctacctgacttcaaactatattacaaggctacagtaaccaaaacagcatggtactggtaccaaaacagagatatagaccaatggaacagaacagagccctcagaaacaataccacacatctacaaccatctgatctttgacaaacctgacaaaaacaagaaatggggaaaggattctctatttaataaatggtgctgggaaaactggctagccatatgtagaaagctgaaactggatcccttctttacaccttatacaaaaattaattcaagatgaattaaagacttacacgttagacctaaaaccataaaaaccctagaagaaaacctaggcaataccattcaggacataggcatggacaaggacttcatgactaaaacaccaaaagcaatggcaacaaaagccaaaattgacaaatgggatctaattaaactaaagagcttctgcacagcaaaagaaactaccatcagagtgaataggaaacctacggaatgggagaaaatttttacaatctacccatctgacaaagggctaatatccagaatctaaaagaacttaaacaaatttacaagaaaaaatcaaatgaccccatcaaaaagtgggtgaaggatatgaacagacacttctcaaaagaagacatttatgtagccaaaagacacatgaaaaaatgctcatcatcactggccatcagagaaatgcaaatcaaaaccacaatgagataccatctcacaccagttagaatggcgatcattaaagtccggaaacaacaggtgctggaaaggatgtagagaaataggaacacttttacactgttgatgggactgtaaactagttcaaacattgtggaagacagtgtggcgattcctctaggatctagaactagaaataccatttgagccagccatcccattactgggtatatacccagaggattataaatcatgctactataaagacacatgcacacgtatgtttattgcggcactatttacaatagcaaatacttggagccaaccaaatgtccatcagtgagcaaggacatcattctgagcaaactatcgcaaggacagaaaaccaaacaccgcatgttctcactcataggtgggaactgaacaatgagaacacttggacacagggtggggaacatcacacactgggacctgtcatggagtaggggtaggggggagggatagcattaggagatatacctaatgtaaatgacgagttaatgggtgcagcacaccaacatggcacatgtatacatatgtaacaaacctgcaggttgtgcacatgtaccctagaacttaaagtataattaaaaaaaaaaagaacctggagaaattatcaagtaagcatcatatttaatgaatttatggtgaaatcatgtgggaaaaatttttctgtacagggatgatgactctggaaatggtggagagagagacagaaaaacaaatgtcactgtaacacaggtatttaaattgtatttaaatacacagacttttgaatttatagaaaattttcaagtatgaaattgatttcatgcaacctaaagtctcaaacttcaaataattttttgtgttaaatttataaattgtgtattaatgcaattcaaatttattcctaaaaatattttaactaaaggagaaattcctggggcctgagattagagttttaggaaatgtacatatgggataaacttacacaggctgaaattaagtgaaaccttacttctcaatgttgagatggattagccattttaacataaagtagaaacttctaagaaatgcagaatctcaacttccccaccctcattccacctaccccacccactcaatcagatcctgcatttcaataagatttatttagtgcaataacttttttacttatcaaagttgagaagcacaggactaaatgataaagagaaaagaggctgcttaggataaggaaataaaaggttgaagttaacttaagtattatgatactttcttagcgtgtcatacggttacctgtcatctttcctctttggttcaacttgttttatggggacatttatgtgggaaaatatctttgcttttgtaatttatgtgggaaaatatctttgcttttgtgtttttacttaagtaaaatctgggctccttttatgtcaactagcttttccactattgttattatgatagaaagtacaggctacttataaacatgattagttcaatgagaacttttagaatattgctgacctaaatctggacatctacacaatcattaattcttaccaaaatgctacaaggcaatataagcataattagcctccctgatccctgaacatagcctaatatcactcactcaatcagaatcatactggaaacgatatgaccaactatggcaggtagtagatgtccagtcacactagtattgctttcagccagatgtctctggtccttgtgagttcctttcgtccttaatggtgaaatagcaacagagggaaccaactcactcactcaaggcagatttcttatttctagacttgtcctgaaaccaacagatccagctctctcctaccaaataccatgaaatttaaacaaacgaaactcgcaaaataatacagcagcagcagcaacaacaacaatgaaatattaaaatagtaaatataagtatcaaacatcaaaaccccctctccaaccaaaatctctcttcttcgataaagttcccaggaggtaacccaatttctaggttggtgtccaatatttgggatcatttgattcaagactgaagtacttaaaatggcttttaaaaaaggaaaaaaggttagatttccagagaaaagtgtaacattttttaagttgaacattatgagggatttgatgggggcagctttgcaagtagaactggagactggtccactgttcaggctttttacgaaagactgcaaaggttgtttgtttccaaacaccaagaagtcaccaagttcaccagtccaaatgcaaatgactcacactaggaaccctaatagtgctgctgttaagtcatttgcaaatgggtggggctgagatgacacagaaccctattttcccaggtggcatcttaagtatggttgattctaccttcagccccacatttaaaagtacagtgtaaacacagctaagggaccgcctccttcaaattacacacaaggcacacctactaataggagatgttgtgaaagccaggtggggctttgtctttcaagtccctgcatccaagaataagcatgctgtgtacaaaaaaaaaaaaaaaagcaagggtgatgcaactgcattcattgtccctaaagggagaacatgcaataattctcagatccaaggataaagggaatccccctttaagaaaagatgttggcattatgtggggattgggaacatgccagaacaatcacacatttttacaagagagagaaagagaaaaaaagttaagacccatttgtcttatttcagtctctttcttcagaattgacgactttaatcaacaggtcactttcagagtattgctggacaccttgactttctgccatgaaatgctatgggaattctggcagttgagagccaacaccccactagacaccagtgctgcataaccacacttttaatagaccccagagctgtggtgacagcatgcccttcccagtttttccacagacggtgctcctgaaattttccatagacagtgtattcttgtggttaattagttatctgagcaatttccattatagaaagagtatctgtacataattaaacccatcttaggaccaaactgccgggcttcaatgtcattaattcagaagggctaaaatgaaaatgagatgaataattctcacctgatgaagggaccgcactagattagatcctatcctctgaaatacatacagcattaaatttaaaaaaacaagagagatgaaaacaggtgatggaagaaactggaaaggtaagttgcctctagagaccaaagaataacactccttttcaaactattatcaagaaatcttgggggaaagataaaattagcaagagaaggctattagctctctgttactcacctttatgaaaccattttcagggatcagtttgttaaattccactgaaacgtggaggtacacagcacagcccttcttctgggatgcacagtcatgccatacagaagcgtgtgggtagacgccaaaacatgtgtggacctgcaaccctttctgtagaaactcagcattctgagtagtaacaaggattaaccttgtgcactcatggagaaaactggtggctccacacatccagttgtccttcgggttatttttgcatcccactctataatttcttttaattacttaactgtaaagcacaggaaagtgctcattacttgtagcttaatgcaggaggaaatataattgaatatgttctcctagccactgctctaccccagctcccagctcttctgaagtgtcacggttcatttcaacagcacgagtaaggcagtttccaggccctgtgcataatgagccatgtggaccctattcaagaaactggctgtactccagaactactataaaatataaggaaaatattaacatcttagatgacaaaagatccatatggctggccagaaaatatctgcatcatttaagccattagaatgcacctatatggaaacattcaatttggcggtactgtgaacaacaggactgtgaaaacatctgtttatctccacccgttttcactaaacactgattcctatagaagacatgcaaactcaaataccaacatatttcatctaagcataggacagggactccatttttacatagttgctataataaatacaatacagtatttgttggtgataggattttggaagatgctctggatagctggaaaaataagtaaaatgtttctctttgtattaaacttgataaaaaataatagctaacatttattaatggtgaggtaaataatttgattatccaccatttatagctgaggaaactgaggcccagagagtttcggtggattccctaagatcacatacccattatgtggtggagagggaatatgaaccagtgctggcttgctatgcctctttccatatggggtcagacatagatgtggtgtcttataatgtgagggaggtctacttggcagaaatatcctgcagaccctatatgccagtttcttatttatttaaacaaagccccatatgagcatttctgataagcagtttgtttacacactaattccacagaggttaaatataaccctaatgtttctttgttgctactctgtttccagtattgaattattaccacaaggtaccaaccatatatgcatacttaatagggtattttgtcaaaactatgcatgaaggtcatttgtttgagatgtcagaacattttcccgtgagaagatctcattgggcattgaaacagaaccacatgctcttcagaccagcaaccgcgactaccaaatactcctctgtcaactctacttgagtaagaacgctttcaattaaggcctaagtgtcaacatgcctttaaaaaaaatcgtggtgacacaaaatctttctttttagcacccaacagaatcccttcaaagcctcgtggtctgacaccctatgctacgtgacttgtgacccatccatttgtcatgttcttcgggaatgtggctaaggggctaagatgtgacttgaaaagaaaggtagaacaagatcatctcaaatttattatcaaggaatagttcagaaaacgacttcagaccacagagacagcagaacagatggtccggcatggatagagcatcagacactcacagactgtgccaacaagagccatcgagtcaaaacagccaaaggaaggagggtcatggaatgggttctctcacaccaaactgatgcccagaggccctcagcatgaataacaaaggcaaccagacccacaagccatactgagtggatacaaaacctatacctaggctgacatcccaaatgtgtgtggcaagttagatgatgatggcacaaaagacagaacaccttgcttctggccattgtcagctcttggaagagagcacacttttagaggagcagctgcaaggagcctgagaacaaaactggaaatgtctgttatgaaagccttcacaggtattattaacaaaagaaaatgtctatttgtcaatggtgtttcagctagattttggcagtccattcttatgcccaggaatgacctcttgtgtagactggatacagtcatcaatgcaactgtccaggtgcaactcttctataaaggggaagaggagtgactttcccctatacagtggccctgtcaaaattctataaaaaatattgtccatttaaattaaataaccactgtgcccggctccatttaccacacttttctatgcagtggaactgaaggggatttttttttttgctgtcctcagagaaaaataagactaagaatcaacctttctaatgagaatggtaaggagttatgtggggatgacctggaatatatgctgctcaaatggtggagatgttatctaggccgtaaatcatggcatttttatatgatcccctatttgcctaatgcaggaaaccacttggcaactttaaggaaaaagtctagcaataatgcatcatagttcaatgtttatattgtacttggacagtttaaatttatcttataaagtactaattatttaattacaaatgttgagtaagtgtaaaatcattcctcaaaaaagcatcccttgagtatgaaagttccaagcttagcaagacatccctgtgatttgggatacatctcttgaactcagtcctgaaaataatgttaatagctgagaaaagagcattgaaagccttatacacagtgtgttgtagtgaaacaattttctttttggttctaaaaaacactgttgtgctctttagatccagcatggctagttagatgaataatgaatgcatgttcaactttctgctacaggaaattctgcaagtggcaacgtgggtccattccgtgtgtgtcactagagctggcgcaagcccatggccatggtgaggcagcgtttccactggaactaatctgatacctgcaccagctcttgcaactgtgcagtgttcccactgcaaactacggatggggtaaaagactgctcacctcctatttctcatctaatctcacacactctgtttgatgaggctatggagaaacaggtcttctcatacactaaaggtgggagtacaaacaattcaagccctgtgcaggacaattaggcaatacctatcaaaattatacatgatttttcctgctgacccagcaattccacttctgggaataattgacagatataggtgcatatgtacaaaatgatggaaagctctctggtatatattagtaagtgataaaacaaggtgtaaaatagtgtatatatggctactaccttttgttttaaaaatgggggaaaatggtggagcttgcggtgagccgagatcgtgccactgcactccagcctgggcgacagagcgagactccgtctcaaaaaaaaaacagggtggggtgggggggaaataatagtacatactcatatttacctgtatctatataaaacacactatcaaggattcacaagaaactaatacaaatgatcaccttatagatggtatgtattgggggatactgaggtgagcagggtataagtggggcaagacttttcagtgtaaacttcttttaaattttattttgatttttgaataatgtaaattaactgtcaaataattaaattaaaaataaccaatttattaacaaaacatttaatctagtggctttacttttgacacaagacaatctccaaatctccaccaatcaccaaaaacagagatttacaccagttcctttgcttgtttttcctggtaatgactacaattaagaagtcctgtgggtgccatctcagttttggagatatttccctagaagaaactgattcaaggtgggacaattgggtatagagaatagtccctgggaccgggggctgaagtcctgaattctggtcctgcctaactcccactttctattaagctgaccctgtgaaacggctgatacatgaccattttttaccaacaaattagacaaattcatgggtgatcaaattcaaaaaccctgttgccttaccactgtaatatgatgaggacacgtatacacaccctgcctaactcacagcatcacaccagggattgtcaacatatgggaaagagctttgtacattgtaaaggtcaaccctacaaacagcagctgtgaaacacaacacaaccctgagggggtggccatggccaaacataggaggggaaaaggacccagtctcaaaagcatctgagatactgagatagtgcagaggaatgaaatcttccaaaagatggaatctaaacataaacagacatcaagagcgggctgacttgcagtggaagatgtggttaaatgactccacatgtggtcatctgccattgcatacactgcaaattctgtgaagcctactaagggaaattagggagatgtaactgggagcgcactgtaaagatactgatacgaacacgaatgtgagatcaatgttgaatgatggacccaaaaggatggctcttagtccttgtgaacatatagttgttggagacatgtgtctgtcatacacagataggcctccaactcacctctgaaatcagatgcaaacttcaaatacttttgaaaagtctccctagaggaccttttacccccaaatgtagagactaaatgaaaaaccattctttaaaaggggttaaaaaaaacactcaaaaaacttctcctttccacatgtatagtcatctggaaaacagatctcccattaaacggatggtcaaagctgtatcacaacattaaactaagcacaaaaattcaagacttcccttcctcaccctcctaaaacgaaacattccaataggctagaaataacctcatgaggaagttcattgaaggtactcccacttggcactactatccagacactgggttaggaaactagttacttggaactcagaaaaaataagaactattttgattaggcaaggcccctgtgcaaggtgcctagttccagctgggtctcagtagtctgatgggtgtcatgcactcctggacctcctcttaatgaaacaagggaccttgactttgggccccatgttgagaagctctgaagccaaatataatggtcaaatataatgtcctctcacttctagcttcatagcagaccatgtttccatatagaaatttctctaggaggcttactatcctatgttatctcaagccgaggcctcctcttacacaagaggcttaaactgcccgtaagtaagaattaaagatatgttacattttttatgaattagtcatttattcattcagcaaaggttattaagaaggtactgagtttggatgtactttgctttaggaaaatcattttcaaggttgcttcatgcaaagtgggaataattaacttggtaactcaatagacttgctaagtgattgccccaagtttaaactgtcactgatttgcaagtatgacatgaaaaccagagacccaaggaggtgggcacattcccacctgtcaatagccctcaagagaagtgcttcagtattaccccaaatggccaactttgcatggttaatcatttagttagaggctcacaagatcaaaaacaattcttaaaaaactatttatgtgaacaaagggacaatgagctgacaccttcaaggtgcacgtcaggggcacaatacaagttcctgtttcaccagcagagctctggtcgctcagttgaagctgaaagtcagaaccagctgtgtttctgtcattccctcatatgaaaagaactcagctgtagacctttactccatgagaaaacattttttaaaaacccacaaataatttttaggtttcatttttgcctctgctttctccagagctacaaaggtcacccaaatttctgtggcgaggttatttaggagagcctttcttttggatgtcaacttgtcaaacttgcagtttagatgagtgtgatgtagtctcctaaaatttacttttgcactattttttcaaataatagatattctctgagcacaggcactgaggacatcaaaatgaatgagactgaatttctgcccttggggactgcagtgttaagggtgggttagacccaaaaaccaacaatacagtgcaatgtggtacatgctgtaactaacatgcacaaagggcattcccaaaaaagagaatgaaaagagggaggaaggtggcaaaggagaaaggcctttggcccaagtttttgttcaataaagatcatattttgtagatcaaaagattatatgatctgctaaccccttagcatgtatagctcatgaagcaagacaaagtacccatgaagagttcaacattagcgagcctctggggcaagtaagttggaaatcataacccatttatggatacctgcctagaactgatttcctattcagagtgccttcctagctgataagaacaatactgaaatctttcttttccatgagggaaaaacatgttgaatcatttagcaagtacctacagagccacctactatgtatgtgcccagcagtctactgtgtgctatcaggagtaagaaaatgtagaaatattcttgcttttaaagggtttacaatctaattgtagaaataatactaaaatacatgagaggaaagaaaagcaaacttagcttctctgggataaggactatatctcatgcaacttttaaaaagttaccatttattcaacttcctaccaccattacatacttctggtaatcaattatcttccttctccccttgggattttgaattgggaacagaatagaaataagttgccaaataagaatcaaaatacagggtcagcctcaatttcagtgcaagtggtccattgctttggttcacaggctctacagtccagaagatgaaagattaaggatttcatccatcagattaacctctcctcttttcacagaaagaacaagtaatggggataagagaagggcctagaatattcccctgaaagtgttacttattaggaagcaagttcccttgtggaaacacaaggatgggggaaagggatttccctcaacattgttctatctacacacagagaattcaagtaacttgcccaaaatcacagagctagtaagtggtgaggcttaaatcaaacttgatcatcaggtccaggaacacaggtacaggctggggctgcctcatgaagtgtctgtttaggaaatgtgtctttaaagtcaacagactgtcctgagtaggacattctagaacatttttctagacaaaaacatcatatctacaacttccagcctagaatctgatacagcaaagacacacaataatgttttgttatataagtgcatatacaattaattaccaaattatgaggtacagaccacctaggaactcagatagggcaggtttattattatgggcaagagtctttctagaaacaggattccagctaggtcttgaagaatgagtagaattcagatgaataaacagcagaaaaaatcattaataaacacatgagactcagagaattacaacaaaacagttttagtcttgtaaactttgctataaagtgaagcatatttaggtatgaagcatgctgattaaactttttattgtcttaatacaagtctaaaaaaagtatctttttgggggagctggaaagtactaaaaataaaaacagtggctgaaattcattaagcatttactatgccaagcactgctctaagcacttcacagacactaacacatttaatccctaccaataccctgttgagaggttgagatacagagaatttaaattactgacccaaggtcatagacctagtaagtgttaggcctggagtcaaactcgatcctcctctggctcaggaatattgttccaggcctttgctctcacctggaagtttctaattagaaaatttatttcaagtcagaataaaatcttcagcagttctctcatctcaaaatgtctgaatttctgattatttacaaggctgcaaatcccttctagccacgctctaatgcaagtacttggatagtgaaataaacgataagtctctctaaatcacaggatattcagtttatttgattttagttcagcgattcttaaactgtcccatacatccaaaccatctgtagaagtttctaaacccaacataggcccagggacccaataccaaacttacaaatcttggagactaagatctcatatgtatatatattttaaagattcaagggtaattctgatgctgaatgtgtttgagaatcactgctgtatgctgcattctattttattgtatttcttttattattattattataataataataataatacttttaagttctggggtacatgtgcagaacgtgcaggtttgttacctaggtatacagatgccatggtggtttgctgcactcatcaacttgtcatctacattaggtatttctcctaatgctatccctcccctagcctcctacaccctgacaggccccagtgtgtgatgttctcctcccagtgtccatgtgttctcactgttcaactcccacttatgagtgagaacatgtggtgtttggttttctgttcctgtgttaccttgccaagaatgatggtttccagcttcatccatgtccctgcaaaggacatgaactcatccttttttatggctgcatagtattccatggtgtatgtgtgtcacattttctttatccagtctatcattgatgggcattcggattggttccaagtctttgctattgtgaatagtgccacaataaacatacatgtgcatgtgtctttatagtagcatgatttataatcctttgagtatatacccagtaatgggatggctgggtcaaaagatatttctggttctagatccttgaggaatcaccacactgtcttccacaatggttgaactaatttacactcccaccaacagtgtaaaagtgttcctatttctctacatcctctcctgcatctgttgtttcctgactttttaatgatcgccattctaactggcataagatggtatctcactgtggttttgatttgcatttctctaatgaccagtgatgatgagcttttcttcgtatgtttgttggcagcataaatttcttcttttgagaagcatctgttcatacccttcgcccactttttgatggggttgttttttttcttgtaaacttgtttaggttccttgtagattctggatattagccttttgtcagatggatacgttgcaaaaaatttcacccattctgtcggttgcctgttcactctgatgttagtttcttttgctgtgcagaagctctttagtttaattagatcccatttgtcaattttggcttttgttgccattgcttttggtattttagtcatgaagtctttgccatgcctatgtcctgaatggtattgcctaggttttcttctagggtttttatggttttatgttttatgtttaagtctttaatccatcttgagttaatttttgtataacgtgtaaggaaggggtccagtttcagttttctgcaaatggctagccagttttcccgacaccatttattaaatagggaatcctttctgcattgcttgtttttgtcatgtttgtcaaagatcagatggttgtagatgtgtggcgttatttctgaggcctctgttctgttccattggtctatctatctgtttatgtaccagtaccatgatgttttggttactgtagccttgtagtatagtttgaagtcaggtagcatgatgcctccagcttgttcattttgcttaggattgtcttggctatacgggctgttttttggttccatatgaaatttaaagtagttttttctaattctatgaagaaagtcaatggtagcttgatggggatagcattggatctataaattactttgggcagtatggccattttcacgatattgattcttcctatccatgagaatggaatgttcttccatttgtttgtgtcctctcttatttcattgagcagtggtttgtagttctctttaaagaggtccttcacatcccttgtaagttgtattcctaggcattttattctctttgtagcaattgtgaatgggagttcactcatgacttggctgtttgtcattattggtgtataggaatgctcgtgatttttgcacattgattttgtatcctgagactttgctgaagttgcttatcagcttaaggagattttgggctgagatgatggggttttctaaatatacaatcatgtcatctgcaaacagagacaatttgacttcctctcttcctatttgaatatgctttatttctttctattgcctgattgccctggctagaacgtccaatactatgttgaataggagtggtgacagagggcatccttgttttgtgccggttttcaaatgaatgcttccagcttttgcccattcagtatgatattggctgtgggtttctcataaatagctcttattattttgagatatgttccatcaatacctagtttattgagagtttttagcatgaagggctgttgaattttatgaaaggccttttctgcatctattgaaataatcatgtggtttttgtcattggttctctttatgtgatggattatctttattgatttgcatatgttgaaccagccttgcatcccagggatgaagccaaattatcatggtagataagctttttgatgtgctgctggattcagtttaccagttttttattgaagatttttgcatcaatgttcatcagggatattggcctacaattttatttttttgctgtgtctctgccaggtttttgtatcaggatgatgccggactcataaaatgagttagggaggattccctccttttctattgattggaatagtttcagaaggaatggtaccagctcttctttgtacttctggtagaattcagctgtgaatccgtctggtcctgggctttttttggttggtaggctgttaattactgcctcgatttcagaacttattattggtctattcaggaatttgacttcttcctttagtcttaggagggtgtatgtgtccaggaatttattcatttcttctagattttctagtttatttgcatagaggtgtttatagtgttctctgatggtagattgtatttttgtgggatcagtggtgatatcctctttatcatcttttattgcgtctatttgattcttctctcttttcttctttatcaatctggctagcattctatctattttgttaatcttttcaaaaaaccagcttctggattcactgatttttttgaagggttttttgtgtctctaatctccttcagttctgctctgatcttagttatttcttgtcttctgctagcttttgaatgtgtttgctcttgcttctctagttcctttaattgtgatgttagagtgttgattttagctctttcctgctttctcctgtgggcatttattgctatgaatttcccctaaacactgttttagctgtgtcccagagattctggtatgttgtatctttattctcattggtctcaaataatgtatttatttctgccttctttttgttatttactcagtagtcattcaggagcaggttgttcagtttccactgtagttgtatggttttgagttagtttcttaatcctgagttctaatttaattgcactttggtctgagagactgtttgttatgatttccattcttttgcatttgctgaggagtgttttacttccaattatgtggtcaattttagaataagtgtgatgtggtgctgagaagaatgtatattctgttgatatggggtggagagttctgtagatgtctattagttccactgggtccagagctgagttcaaatcctgaatatgcttgttaattttctgtctcgttgacctaatattgacattggggtgttaaagtctcacactattattgtgtgggagtcttggtctctttgtgggtctctaagaacttgctttatgaatctgggtgctcctgtattgggtgcatatatgtttaggatagttagctcttcttgttgaattgatccctttatcattatgtaatggccttctttgtctcttttgatctttgttggtttaaagtctgttttatcagagactaggattgcaacccctgctttttttttgctttccatttgcttggtagatcttcctccatccctttattttcagcctatgtgtgtctttgcatgtgagatgggtctccagaacacagcacactgatgggtcttgactctttatccaatttgccagtctgtggtcttttaattggggcatttagcccatttatatttaaggttaatattgttatgtgtgaatttgatcctgtcattatgatgttagctggttattttgcccattagttgatgcagtttcttcatagtttcaatggtctttacaatttggtatgtttctgcagtggctggtaccggtttttcctttccttatttagtacttccttcaggagctcttgtaaggcatgcctggtggtgacaaaatctctcagcatttgctcgtctgtaaaggattttatttctacttcacttctgaagcttagttggctggatatgaaattctgggttgaaaattcttttctttaagaatgttgaatattggcccccactctcttctggcttgtaggcttgtagggtttctgctgagagatccactgttagtctgatgggcttccctttttgggtaacccgacctttctctctcgctgcccttaactttttttcctgcatttcaaccttggtgaatctgacaattacatgtcttgggtttgctcttcttgaggggtatctttgtggtgttctctgtatttcctgaatttgaatgttggcttgtcttgctagtttggggaagttctcctggataatatcctaaggagtgttttccaacttggttccattgtccccgccactttcaggtacaccaatgaaatgtaggtttggtcttttcacatagtcccacatttcttggaggctttgttccttccttttcattctttttttctctaatcttgtcttcatgctttatttcattaaattgatcttcaatctctgatatcctttcctctgctttatcgattcagttattgaagcttgtgtatgcttcacagagttctcgtgctgtgtttttcagctccattaggtcatttatgttcttctctaaactagttattctagttagcaattcctccaaccttttttcaaggttcttagcttctttgcattgggttagagcatgctcctttagcttggaggagtctgtttttacccactttctgaagcatacttctgtcaattcatcaaactcattctccatccagttttgttcccttgctggcaaagagttgtgctcccttggaggagaagaggcattctggtttttggaattttcagcctttttgtgctggattttcctcatccttgtggatttatctatgtttgatctttgatgttggcgacctttgtacggggttttcgtgtggacatcctttttgttgatgttgatgctattcctgtttgttagttttccttctaacagtcaggcccctctgctgcaggtctgctggaatttggtggaggtccactccagaccctgtttgcctgggtatcaccagcagaagctgcagaacagcaaagactgctgcctgttccttcctctggaaggtttgtcccagaggggcacccaccagatgccagccagagctctcctgtatgaagtgtctgtcgacccctgctgggaggtgtctcccactcaggaatcacgagggtcagggacctgcttaagaaggcagtctgtcccttagcagagctcaagtgctgtgctgggagatccactgctctcttcacagccaacaggcaaagaacatttaagtctgctgaagctgggcccacagccaccccctctcccaggtgctctgtcccatgagatgggagttttatctataagcccctgactggggctgctgcctttctttcccagatgccctgcccagagagggagaatctagagaggcaatctggctacaggggctttgctgagctgtggtaggctccacccagttcaaacttcccagtggctttgtttacattgtgagaggaaaacagcctactcaagcctcagtaatggcggatgcccctcccccgaccaagctggagcatcccaggttgacttcaggcagctgtgctggcagtgagaatttcaaaccagcagatcttaccttgccgtgctccatgggggtgggatctgctgagctagatcacttggctgcctggccttcagcccctttccgggggagtgaatggttctgtctcactggaatttcaggtgccactggggtatgagaaaaaactcctgcagctaactgggtgtctgcccaaatggccacccagttttgtacttgaaacccagggccctggtggtgtaggcacccaagggaatctcctggtctgccggctgcaaagactgtaggaaatgtgtagtatctgggccagatagcactgtccctcatggcacagtccctcagggcttcccttggctaggggagggagttcccctgaccccttgcgcttcctgagtgaggcaatgctccaccctgctttggctcaccctccatgggctgcacccactgtctaaccagtcccaatgagatgagcccggtacctcagttggaaatgcagaaatcacccaccttctgcattgatctctctgggagctgcagactgcagctgttcctatttgccatctggccagccacctaatatttctaatcattcacttagcaagagtctcaggtttaagtaaaattataactaagttactaaggaacaatacatcaaaagtcatatattcatttttccctctaagagttttttcttttttaaaaaaattaaattaaaaaactccttggaaaaaacatttttaatcttcccattaccactttattccttggcacacagaagggtaccagtctctgctggagacaaaggtggacagtaggccagggtgacaatatcagcctgttcctgctccaggtctcacattaatgcatcaagggcaagatatggtttcttacttgaatactgcaggttttggttatagacagctggagtggtggtaaggggactaggttaggtgaagtcactgggctatcatccttgctctggttctacagctgtgcattttggattgctatttagcttctctaagctccagtttcctcctctgttatatagaaataatgtctgccaatcttttttatagagttatttgtaggatcaaatggaatgagatatgtgaatgcattttaaaaatgtatggaataccacacatttggacaagattattattgaagtgtgcaatcttgtctacatgacaagtgaaatcacgtaggaatcgtagtaacaacaaaccagctgaattttggtctcagtaccaatgcctactggggcactgcagtagagcaagttttcctaacacctcatggaacagtgacagtgaaggttctcctaggtttttatgtgagactgcctgaagagcaattacaggctctggaacaatagatgctactaagtttattttattttattattattttttattttactttaagttccgggatacatgtgcagaatgtgcaggtttgttacataggtaaatatgtgtcatggtggtttgctgcacctatca

SEQ ID NO: 956 - DNA, 194952 bp, Homo sapiens
tgataggtgcagcaaaccaccatgacacatatttacctatgtaacaaacctgcacattctgcacatgtatcccggaacttaaagtaaaataaaaaataataataaaataaaataaacttagtagcatctattgttccagagcctgtaattgctcttcaggcagtctcacataaaaacctaggagaaccttcactgtcactgttccatgaggtgttaggaaaacttgctctactgcagtgccccagtaggcattggtactgagaccaaaattcagctggtttgttgttactacgattcctacgtgatttcacttgtcatgtagacaagattgcacacttcaataataatcttgtccaaatgtgtggtattccatacatttttaaaatgcattcacatatctcattccatttgatcctacaaataactctataaaaaagattggcagacattatttctatataacagaggaggaaactggagcttagagaagctaaatagcaatccaaaatgcacagctgtagaaccagagcaaggatgatagcccagtgacttcacctaacctagtccccttaccaccactccagctgtctataaccaaaacctgcagtattcaagtaagaaaccatatcttgcccttgatgcattaatgtgagacctggagcaggaacaggctgatattgtcaccctggcctactgtccacctttgtctccagcagagactggtacccttctgtgtgccaaggaataaagtggtaatgggaagattaaaaatgttttttccaaggagttttttaatttaatttttttaaaaaagaaaaaactcttagagggaaaaatgaatatatgacttttgatgtattgttccttagtaacttagttataattttacttaaacctgagactcttgctaagtgaatgattagaaatattaggtggctggccagatggcaaataggaacagctgcagtctgcagctcccagagagatcaatgcagaaggtgggtgatttctgcatttccaactgaggtaccgggctcatctcattgggactggttagacagtgggtgcagcccatggagggtgagccaaagcagggtggagcattgcctcactcaggaagcgcaaggggtcaggggaactccctcccctagccaagggaagccctgagggactgtgccatgagggacagtgctatctggcccagatactacacatttcctacagtctttgcagccggcagaccaggagattcccttgggtgcctacaccaccagggccctgggtttcaagtacaaaactgggtggccatttgggcagacacccagttagctgcaggagttttttctcataccccagtggcacctgaaattccagtgagacagaaccattcactcccccggaaaggggctgaaggccaggcagccaagtgatctagctcagcagatcccacccccatggagcacggcaaggtaagatctgctggtttgaaattctcactgccagcacagctgcctgaagtcaacctgggatgctccagcttggtcgggggaggggcatccgccattactgaggcttgagtaggctgttttcctctcacaatgtaaacaaagccactgggaagtttgaactgggtggagcctaccacagctcagcaaagcccctgtagccagattgcctctctagattctccctctctgggcagggcatctgggaaagaaaggcagcagccccagtcaggggcttatagataaaactcccatctcatgggacagagcacctgggagagggggtggctgtgggcccagcttcagcagacttaaatgttctttgcctgttggctgtgaagagagcagtggatctcccagcacagcacttgagctctgctaagggacagactgccttcttaagcaggtccctgaccctcgtgattcctgagtgggagacacctcccagcaggggtcgacagacacttcatacaggagagctctggctggcatctggtgggtgcccctctgggacaaaccttccagaggaaggaacaggcagcagtctttgctgttctgcagcttctgctggtgatacccaggcaaacagggtctggagtggacctccaccaaattccagcagacctgcagcagaggggcctgactgttagaaggaaaactaacaaacaggaatagcatcaacatcaacaaaaaggatgtccacacgaaaaccccgtacaaaggtcgccaacatcaaagatcaaacatagataaatccacaaggatgaggaaaatccagcacaaaaaggctgaaaattccaaaaaccagaatgcctcttctcctccaagggagcacaactctttgccagcaagggaacaaaactggatggagaatgagtttgatgaattgacagaagtatgcttcagaaagtgggtaaaaacagactcctccaagctaaaggagcatgctctaacccaatgcaaagaagctaagaaccttgaaaaaaggttggaggaattgctaactagaataactagtttagagaagaacataaatgacctaatggagctgaaaaacacagcacgagaactctgtgaagcatacacaagcttcaataactgaatcgataaagcagaggaaaggatatcagagattgaagatcaatttaatgaaataaagcatgaagacaagattagagaaaaaaagaatgaaaaggaaggaacaaagcctccaagaaatgtgggactatgtgaaaagaccaaacctacatttcattggtgtacctgaaagtggcggggacaatggaaccaagttggaaaacactccttaggatattatccaggagaacttccccaaactagcaagacaagccaacattcaaattcaggaaatacagagaacaccacaaagatacccctcaagaagagcaaacccaagacatgtaattgtcagattcaccaaggttgaaatgcaggaaaaaaagttaagggcagcgagagagaaaggtcgggttacccaaaaagggaagcccatcagactaacagtggatctctcagcagaaaccctacaagcctacaagccagaagagagtgggggccaatattcaacattcttaaagaaaagaattttcaacccagaatttcatatccagccaactaagcttcagaagtgaagtagaaataaaatcctttacagacgagcaaatgctgagagattttgtcaccaccaggcatgccttacaagagctcctgaaggaagtactaaataaggaaaggaaaaaccggtaccagccactgcagaaacataccaaattgtaaagaccattgaaactatgaagaaactgcatcaactaatgggcaaaataaccagctaacatcataatgacaggatcaaattcacacataacaatattaaccttaaatataaatgggctaaatgccccaattaaaagaccacagactggcaaattggataaagagtcaagacccatcagtgtgctgtgttctggagacccatctcacatgcaaagacacacataggctgaaaataaagggatggaggaagatctaccaagcaaatggaaagcaaaaaaaaagcaggggttgcaatcctagtctctgataaaacagactttaaaccaacaaagatcaaaagagacaaagaaggccattacataatgataaagggatcaattcaacaagaagagctaactatcctaaacatatatgcacccaatacaggagcacccagattcataaagcaagttcttagagacccacaaagagaccaagactcccacacaataatagtgtgagactttaacaccccaatgtcaatattaggtcaacgagacagaaaattaacaagcatattcaggatttgaactcagctctggacccagtggaactaatagacatctacagaactctccaccccatatcaacagaatatacattcttctcagcaccacatcacacttattctaaaattgaccacataattggaagtaaaacactcctcagcaaatgcaaaagaatggaaatcataacaaacagtctctcagaccaaagtgcaattaaattagaactcaggattaagaaactaactcaaaaccatacaactacagtggaaactgaacaacctgctcctgaatgactactgagtaaataacaaaaagaaggcagaaataaatacattatttgagaccaatgagaataaagatacaacataccagaatctctgggacacagctaaaacagtgtttaggggaaattcatagcaataaatgcccacaggagaaagcaggaaagagctaaaatcaacactctaacatcacaattaaaggaactagagaagcaagagcaaacacattcaaaagctagcagaagacaagaaataactaagatcagagcagaactgaaggagattagagacacaaaaaacccttcaaaaaaatcagtgaatccagaagctggttttttgaaaagattaacaaaatagatagaatgctagccagattgataaagaagaaaagagagaagaatcaaatagacgcaataaaagatgataaagaggatatcaccactgatcccacaaaaatacaatctaccatcagagaacactataaacacctctatgcaaataaactagaaaatctagaagaaatgaataaattcctggacacatacaccctcctaagactaaaggaagaagtcaaattcctgaatagaccaataataagttctgaaatcgaggcagtaattaacagcctaccaaccaaaaaaagcccaggaccagacggattcacagctgaattctaccagaagtacaaagaagagctggtaccattccttctgaaactattccaatcaatagaaaaggagggaatcctccctaactcattttatgagtccggcatcatcctgatacaaaaacctggcagagacacagcaaaaaaataaaattgtaggccaatatccctgatgaacattgatgcaaaaatcttcaataaaaaactggtaaactgaatccagcagcacatcaaaaagcttatctaccatgataatttggcttcatccctgggatgcaaggctggttcaacatatgcaaatcaataaagataatccatcacataaagagaaccaatgacaaaaaccacatgattatttcaatagatgcagaaaaggcctttcataaaattcaacagcccttcatgctaaaaactctcaataaactaggtattgatggaacatatctcaaaataataagagctatttatgagaaacccacagccaatatcatactgaatgggcaaaagctggaagcattcatttgaaaaccggcacaaaacaaggatgccctctgtcaccactcctattcaacatagtattggacgttctagccagggcaatcaggcaatagaaagaaataaagcatattcaaataggaagagaggaagtcaaattgtctctgtttgcagatgacatgattgtatatttagaaaaccccatcatctcagcccaaaatctccttaagctgataagcaacttcagcaaagtctcaggatacaaaatcaatgtgcaaaaatcacgagcattcctatacaccaataatgacaaacagccaagtcatgagtgaactcccattcacaattgctacaaagagaataaaatgcctaggaatacaacttacaagggatgtgaaggacctctttaaagagaactacaaaccactgctcaatgaaataagagaggacacaaacaaatggaagaacattccattctcatggataggaagaatcaatatcgtgaaaatggccatactgcccaaagtaatttatagatccaatgctatccccatcaagctaccattgactttcttcatagaattagaaaaaactactttaaatttcatatggaaccaaaaaacagcccgtatagccaagacaatcctaagcaaaatgaacaagctggaggcatcatgctacctgacttcaaactatactacaaggctacagtaaccaaaacatcatggtactggtacataaacagatagatagaccaatggaacagaacagaggcctcagaaataacgccacacatctacaaccatctgatctttgacaaacatgacaaaaacaagcaatgcagaaaggattccctatttaataaatggtgtcgggaaaactggctagccatttgcagaaaactgaaactggaccccttccttacacgttatacaaaaattaactcaagatggattaaagacttaaacataaaacataaaaccataaaaaccctagaagaaaacctaggcaataccattcaggacataggcatggcaaagacttcatgactaaaataccaaaagcaatggcaacaaaagccaaaattgacaaatgggatctaattaaactaaagagcttctgcacagcaaaagaaactaacatcagagtgaacaggcaaccgacagaatgggtgaaattttttgcaacgtatccatctgacaaaaggctaatatccagaatctacaaggaacctaaacaagtttacaagaaaaaaaacaaccccatcaaaaagtgggcgaagggtatgaacagatgcttctcaaaagaagaaatttatgctgccaacaaacatacgaagaaaagctcatcatcactggtcattagagaaatgcaaatcaaaaccacagtgagataccatcttatgccagttagaatggcgatcattaaaaagtcaggaaacaacagatgcaggagaggatgtagagaaataggaacacttttacactgttggtgggagtgtaaattagttcaaccattgtggaagacagtgtggtgattcctcaaggatctagaaccagaaatatcttttgacccagccatcccattactgggtatatactcaaaggattataaatcatgctactataaagacacatgcacatgtatgtttattgtggcactattcacaatagcaaagacttggaaccaatccgaatgcccatcaatgatagactggataaagaaaatgtgacacacatacaccatggaatactatgcagccataaaaaaggatgagttcatgtcctttgcagggacatggatgaagctggaaaccatcattcttggcaaggtaacacaggaacagaaaaccaaacaccacatgttctcactcataagtgggagttgaacagtgagaacacatggacactgggaggagaacatcacacactggggcctgtcagggtgtaggaggctaggggagggatagcattaggagaaatacctaatgtagatgacaagttgatgagtgcagcaaaccaccatggcatctgtatacctaggtaacaaacctgcacgttctgcacatgtaccccagaacttaaaagtattattattattattataataataataataaaagaaatacaataaaatagaatgcagcatacagcagtgattctcaaacacattcagcatcagaattacccttgaatctttaaaatatatatacatatgagatcttagtctccaagatttgtaagtttggtattgggtccctgggcctatgttgggtttagaaacttctacagatggtttggatgtatgggacagtttaagaatcgctgaactaaaatcaaataaactgaatatcctgtgatttagagagacttatcgtttatttcactatccaagtacttgcattagagcgtggctagaagggatttgcagccttgtaaataatcagaaattcagacattttgagatgagagaactgctgaagattttattctgacttgaaataaattttctaattagaaacttccaggtgagagcaaaggcctggaacaatattcctgagccagaggaggatcgagtttgactccaggcctaacacttactaggtctatgaccttgggtcagtaatttaaattctctgtatctcaacctctcaacagggtattggtagggattaaatgtgttagtgtctgtgaagtgcttagagcagtgcttggcatagtaaatgcttaatgaatttcagccactgtttttatttttagtactttccagctcccccaaaaagatactttttttagacttgtattaagacaataaaaagtttaatcagcatgcttcatacctaaatatgcttcactttatagcaaagtttacaagactaaaactgttttgttgtaattctctgagtctcatgtgtttattaatgattttttctgctgtttattcatctgaattctactcattcttcaagacctagctggaatcctgtttctagaaagactcttgcccataataataaacctgccctatctgagttcctaggtggtctgtacctcataatttggtaattaattgtatatgcacttatataacaaaacattattgtgtgtctttgctgtatcagattctaggctggaagttgtagatatgatgtttttgtctagaaaaatgttctagaatgtcctactcaggacagtctgttgactttaaagacacatttcctaaacagacacttcatgaggcagccccagcctgtacctgtgttcctggacctgatgatcaagtttgatttaagcctcaccacttactagctctgtgattttgggcaagttacttgaattctctgtgtgtagatagaacaatgttgagggaaatccctttcccccatccttgtgtttccacaagggaacttgcttcctaataagtaacactttcaggggaatattctaggcccttctcttatccccattacttgttctttctgtgaaaagaggagaggttaatctgatggatgaaatccttaatctttcatcttctggactgtagagcctgtgaaccaaagcaatggaccacttgcactgaaattgaggctgaccctgtattttgattcttatttggcaacttatttctattctgttcccaattcaaaatcccaaggggagaaggaagataattgattaccagaagtatgtaatggtggtaggaagttgaataaatggtaactttttaaaagttgcatgagatatagtccttatcccagagaagctaagtttgcttttctttcctctcatgtattttagtattatttctacaattagattgtaaaccctttaaaagcaagaatatttctacattttcttactcctgatagcacacagtagactgctgggcacatacatagtaggtggctctgtaggtacttgctaaatgattcaacatgtttttccctcatggaaaagaaagatttcagtattgttcttatcagctaggaaggcactctgaataggaaatcagttctaggcaggtatccataaatgggttatgatttccaacttacttgccccagaggctcgctaatgttgaactcttcatgggtactttgtcttgcttcatgagctatacatgctaaggggttagcagatcatataatcttttgatctacaaaatatgatctttattgaacaaaaacttgggccaaaggcctttctcctttgccaccttcctccctcttttcattctcttttttgggaatgccctttgtgcatgttagttacagcatgtaccacattgcactgtattgttggtttttgggtctaacccacccttaacactgcagtccccaagggcagaaattcagtctcattcattttgatgtcctcagtgcctgtgctcagagaatatctattatttgaaaaaatagtgcaaaagtaaattttaggagactacatcacactcatctaaactgcaagtttgacaagttgacatccaaaagaaaggctctcctaaataacctcgccacagaaatttgggtgacctttgtagctctggagaaagcagaggcaaaaatgaaacctaaaaattatttgtgggtttttaaaaaatgttttctcatggagtaaaggtctacagctgagttcttttcatatgagggaatgacagaaacacagctggttctgactttcagcttcaactgagcgaccagagctctgctggtgaaacaggaacttgtattgtgcccctgacgtgcaccttgaaggtgtcagctcattgtccctttgttcacataaatagttttttaagaattgtttttgatcttgtgagcctctaactaaatgattaaccatgcaaagttggccatttggggtaatactgaagcacttctcttgagggctattgacaggtgggaatgtgcccacctccttgggtctctggttttcatgtcatacttgcaaatcagtgacagtttaaacttggggcaatcacttagcaagtctattgagttaccaagttaattattcccactttgcatgaagcaaccttgaaaatgattttcctaaagcaaagtacatccaaactcagtaccttcttaataacctttgctgaatgaataaatgactaattcataaaaaatgtaacatatctttaattcttacttacgggcagtttaagcctcttgtgtaagaggaggcctcggcttgagataacataggatagtaagcctcctagagaaatttctatatggaaacatggtctgctatgaagctagaagtgagaggacattatatttgaccattatatttggcttcagagcttctcaacatggggcccaaagtcaaggtcccttgtttcattaagaggaggtccaggagtgcatgacacccatcagactactgagacccagctggaactaggcaccttgcacaggggccttgcctaatcaaaatagttcttattttttctgagttccaagtaactagtttcctaacccagtgtctggatagtagtgccaagtgggagtaccttcaatgaacttcctcatgaggttatttctagcctattggaatgtttcgttttaggagggtgaggaagggaagtcttgaatttttgtgcttagtttaatgttgtgatacagctttgaccatccgtttaatgggagatctgttttccagatgactatacatgtggaaaggagaagttttttgagtgttttttttaaccccttttaaagaatggtttttcatttagtctctacatttgggggtaaaaggtcctctagggagacttttcaaaagtatttgaagtttgcatctgatttcagaggtgagttggaggcctatctgtgtatgacagacacatgtctccaacaactatatgttcacaaggactaagagccatccttttgggtccatcattcaacattgatctcacattcgtgttcgtatcagtatctttacagtgcgctcccagttacatctccctaatttcccttagtaggcttcacagaatttgcagtgtatgcaatggcagatgaccacatgtggagtcatttaaccacatcttccactgcaagtcagcccgctcttgatgtctgtttatgtttagattccatcttttggaagatttcattcctctgcactatctcagtatctcagatgcttttgagactgggtccttttcccctcctatgtttggccatggccaccccctcagggttgtgttgtgtttcacagctgctgtttgtagggttgacctttacaatgtacaaagctctttcccatatgttgacaatccctggtgtgatgctgtgagttaggcagggtgtgtatacgtgtcctcatcatattacagtggtaaggcaacagggtttttgaatttgatcacccatgaatttgtctaatttgttggtaaaaaatggtcatgtatcagccgtttcacagggtcagcttaatagaaagtgggagttaggcaggaccagaattcaggacttcagcccccggtcccagggactattctctatacccaattgtcccaccttgaatcagtttcttctagggaaatatctccaaaactgagatggcacccacaggacttcttaattgtagtcattaccaggaaaaacaagcaaaggaactggtgtaaatctctgtttttggtgattggtggagatttggagattgtcttgtgtcaaaagtaaagccactagattaaatgttttgttaataaattggttatttttaatttaattatttgacagttaatttacattattcaaaaatcaaaataaaatttaaaagaagtttacactgaaaagtcttgccccacttataccctgctcacctcagtatcccccaatacataccatctataaggtgatcatttgtattagtttcttgtgaatccttgatagtgtgttttatatagatacaggtaaatatgagtatgtactattatttcccccccaccccaccctgttttttttttgagacggagtctcgctctgtcgcccaggctggagtgcagtggcacgatctcggctcaccgcaagctccaccattttcccccatttttaaaacaaaaggtagtagccatatatacactattttacaccttgttttatcacttactaatatataccagagagctttccatcattttgtacatatgcacctatatctgtcaattattcccagaagtggaattgctgggtcagcaggaaaaatcatgtataattttgataggtattgcctaattgtcctgcacagggcttgaattgtttgtactcccacctttagtgtatgagaagacctgtttctccatagcctcatcaaacagagtgtgtgagattagatgagaaataggaggtgagcagtcttttaccccatccgtagtttgcagtgggaacactgcacagttgcaagagctggtgcaggtatcagattagttccagtggaaacgctgcctcaccatggccatgggcttgcgccagctctagtgacacacacggaatggacccacgttgccacttgcagaatttcctgtagcagaaagttgaacatgcattcattattcatctaactagccatgctggatctaaagagcacaacagtgttttttagaaccaaaaagaaaattgtttcactacaacacactgtgtataaggctttcaatgctcttttctcagctattaacattattttcaggactgagttcaagagatgtatcccaaatcacagggatgtcttgctaagcttggaactttcatactcaagggatgcttttttgaggaatgattttacacttactcaacatttgtaattaaataattagtactttataagataaatttaaactgtccaagtacaatataaacattgaactatgatgcattattgctagactttttccttaaagttgccaagtggtttcctgcattaggcaaataggggatcatataaaaatgccatgatttacggcctagataacatctccaccatttgagcagcatatattccaggtcatccccacataactccttaccattctcattagaaaggttgattcttagtcttatttttctctgaggacagcaaaaaaaaaaatccccttcagttccactgcatagaaaagtgtggtaaatggagccgggcacagtggttatttaatttaaatggacaatattttttatagaattttgacagggccactgtataggggaaagtcactcctcttcccctttatagaagagttgcacctggacagttgcattgatgactgtatccagtctacacaagaggtcattcctgggcataagaatggactgccaaaatctagctgaaacaccattgacaaatagacattttcttttgttaataatacctgtgaaggctttcataacagacatttccagttttgttctcaggctccttgcagctgctcctctaaaagtgtgctctcttccaagagctgacaatggccagaagcaaggtgttctgtcttttgtgccatcatcatctaacttgccacacacatttgggatgtcagcctaggtataggttttgtatccactcagtatggcttgtgggtctggttgcctttgttattcatgctgagggcctctgggcatcagtttggtgtgagagaacccattccatgaccctccttcctttggctgttttgactcgatggctcttgttggcacagtctgtgagtgtctgatgctctatccatgccggaccatctgttctgctgtctctgtggtctgaagtcgttttctgaactattccttgataataaatttgagatgatcttgttctacctttcttttcaagtcacatcttagccccttagccacattcccgaagaacatgacaaatggatgggtcacaagtcacgtagcatagggtgtcagaccacgaggctttgaagggattctgttgggtgctaaaaagaaagattttgtgtcaccacgattttttttaaaggcatgttgacacttaggccttaattgaaagcgttcttactcaagtagagttgacagaggagtatttggtagtcgcggttgctggtctgaagagcatgtggttctgtttcaatgcccaatgagatcttctcacgggaaaatgttctgacatctcaaacaaatgaccttcatgcatagttttgacaaaataccctattaagtatgcatatatggttggtaccttgtggtaataattcaatactggaaacagagtagcaacaaagaaacattagggttatatttaacctctgtggaattagtgtgtaaacaaactgcttatcagaaatgctcatatggggctttgtttaaataaataagaaactggcatatagggtctgcaggatatttctgccaagtagacctccctcacattataagacaccacatctatgtctgaccccatatggaaagaggcatagcaagccagcactggttcatattccctctccaccacataatgggtatgtgatcttagggaatccaccgaaactctctgggcctcagtttcctcagctataaatggtggataatcaaattatttacctcaccattaataaatgttagctattattttttatcaagtttaatacaaagagaaacattttacttatttttccagctatccagagcatcttccaaaatcctatcaccaacaaatactgtattgtatttattatagcaactatgtaaaaatggagtccctgtcctatgcttagatgaaatatgttggtatttgagtttgcatgtcttctataggaatcagtgtttagtgaaaacgggtggagataaacagatgttttcacagtcctgttgttcacagtaccgccaaattgaatgtttccatataggtgcattctaatggcttaaatgatgcagatattttctggccagccatatggatcttttgtcatctaagatgttaatattttccttatattttatagtagttctggagtacagccagtttcttgaatagggtccacatggctcattatgcacagggcctggaaactgccttactcgtgctgttgaaatgaaccgtgacacttcagaagagctgggagctggggtagagcagtggctaggagaacatattcaattatatttcctcctgcattaagctacaagtaatgagcactttcctgtgctttacagttaagtaattaaaagaaattatagagtgggatgcaaaaataacccgaaggacaactggatgtgtggagccaccagttttctccatgagtgcacaaggttaatccttgttactactcagaatgctgagtttctacagaaagggttgcaggtccacacatgttttggcgtctacccacacgcttctgtatggcatgactgtgcatcccagaagaagggctgtgctgtgtacctccacgtttcagtggaatttaacaaactgatccctgaaaatggtttcataaaggtgagtaacagagagctaatagccttctcttgctaattttatctttcccccaagatttcttgataatagtttgaaaaggagtgttattctttggtctctagaggcaacttacctttccagtttcttccatcacctgttttcatctctcttgtttttttaaatttaatgctgtatgtatttcagaggataggatctaatctagtgcggtcccttcatcaggtgagaattattcatctcattttcattttagcccttctgaattaatgacattgaagcccggcagtttggtcctaagatgggtttaattatgtacagatactctttctataatggaaattgctcagataactaattaaccacaagaatacactgtctatggaaaatttcaggagcaccgtctgtggaaaaactgggaagggcatgctgtcaccacagctctggggtctattaaaagtgtggttatgcagcactggtgtctagtggggtgttggctctcaactgccagaattcccatagcatttcatggcagaaagtcaaggtgtccagcaatactctgaaagtgacctgttgattaaagtcgtcaattctgaagaaagagactgaaataagacaaatgggtcttaactttttttctctttctctctcttgtaaaaatgtgtgattgttctggcatgttcccaatccccacataatgccaacatcttttcttaaagggggattccctttatccttggatctgagaattattgcatgttctccctttagggacaatgaatgcagttgcatcacccttgcttttttttttttttttgtacacagcatgcttattcttggatgcagggacttgaaagacaaagccccacctggctttcacaacatctcctattagtaggtgtgccttgtgtgtaatttgaaggaggcggtcccttagctgtgtttacactgtacttttaaatgtggggctgaaggtagaatcaaccatacttaagatgccacctgggaaaatagggttctgtgtcatctcagccccacccatttgcaaatgacttaacagcagcactattagggttcctagtgtgagtcatttgcatttggactggtgaacttggtgacttcttggtgtttggaaacaaacaacctttgcagtctttcgtaaaaagcctgaacagtggaccagtctccagttctacttgcaaagctgcccccatcaaatccctcataatgttcaacttaaaaaatgttacacttttctctggaaatctaaccttttttccttttttaaaagccattttaagtacttcagtcttgaatcaaatgatcccaaatattggacaccaacctagaaattgggttacctcctgggaactttatcgaagaagagagattttggttggagagggggttttgatgtttgatacttatatttactattttaatatttcattgttgttgttgctgctgctgctgtattattttgcgagtttcgtttgtttaaatttcatggtatttggtaggagagagctggatctgttggtttcaggacaagtctagaaataagaaatctgccttgagtgagtgagttggttccctctgttgctatttcaccattaaggacgaaaggaactcacaaggaccagagacatctggctgaaagcaatactagtgtgactggacatctactacctgccatagttggtcatatcgtttccagtatgattctgattgagtgagtgatattaggctatgttcagggatcagggaggctaattatgcttatattgccttgtagcattttggtaagaattaatgattgtgtagatgtccagatttaggtcagcaatattctaaaagttctcattgaactaatcatgtttataagtagcctgtactttctatcataataacaatagtggaaaagctagttgacataaaaggagcccagattttacttaagtaaaaacacaaaagcaaagatattttcccacataaattacaaaagcaaagatattttcccacataaatgtccccataaaacaagttgaaccaaagaggaaagatgacaggtaaccgtatgacacgctaagaaagtatcataatacttaagttaacttcaaccttttatttccttatcctaagcagcctcttttctctttatcatttagtcctgtgcttctcaactttgataagtaaaaaagttattgcactaaataaatcttattgaaatgcaggatctgattgagtgggtggggtaggtggaatgagggtggggaagttgagattctgcatttcttagaagtttctactttatgttaaaatggctaatccatctcaacattgagaagtaaggtttcacttaatttcagcctgtgtaagtttatcccatatgtacatttcctaaaactctaatctcaggccccaggaatttctcctttagttaaaatatttttaggaataaatttgaattgcattaatacacaatttataaatttaacacaaaaaattatttgaagtttgagactttaggttgcatgaaatcaatttcatacttgaaaattttctataaattcaaaagtctgtgtatttaaatacaatttaaatacctgtgttacagtgacatttgtttttctgtctctctctccaccatttccagagtcatcatccctgtacagaaaaatttttcccacatgatttcaccataaattcattaaatatgatgcttacttgataatttctccaggttctttttttttttaattatactttaagttctagggtacatgtgcacaacctgcaggtttgttacatatgtatacatgtgccatgttggtgtgctgcacccattaactcgtcatttacattaggtatatctcctaatgctatccctcccccctacccctactccatgacaggtcccagtgtgtgatgttccccaccctgtgtccaagtgttctcattgttcagttcccacctatgagtgagaacatgcggtgtttggttttctgtccttgcgatagtttgctcagaatgatgtccttgctcactgatggacatttggttggctccaagtatttgctattgtaaatagtgccgcaataaacatacgtgtgcatgtgtctttatagtagcatgatttataatcctctgggtatatacccagtaatgggatggctggctcaaatggtatttctagttctagatcctagaggaatcgccacactgtcttccacaatgtttgaactagtttacagtcccatcaacagtgtaaaagtgttcctatttctctacatcctttccagcacctgttgtttccggactttaatgatcgccattctaactggtgtgagatggtatctcattgtggttttgatttgcatttctctgatggccagtgatgatgagcattttttcatgtgtcttttggctacataaatgtcttcttttgagaagtgtctgttcatatccttcacccactttttgatggggtcatttgattttttcttgtaaatttgtttaagttcttttagattctggatattagccctttgtcagatgggtagattgtaaaaattttctcccattccgtaggtttcctattcactctgatggtagtttcttttgctgtgcagaagctctttagtttaattagatcccatttgtcaattttggcttttgttgccattgcttttggtgttttagtcatgaagtccttgtccatgcctatgtcctgaatggtattgcctaggttttcttctagggtttttatggttttaggtctaacgtgtaagtctttaattcatcttgaattaatttttgtataaggtgtaaagaagggatccagtttcagctttctacatatggctagccagttttcccagcaccatttattaaatagagaatcctttccccatttcttgtttttgtcaggtttgtcaaagatcagatggttgtagatgtgtggtattgtttctgagggctctgttctgttccattggtctatatctctgttttggtaccagtaccatgctgttttggttactgtagccttgtaatatagtttgaagtcaggtagcgtgatgcctccagctttgttcttttggtttaggattgtcttggcgatgcgggctcttttttggttccatatgaactttaaagtagtttttttccaattctgtggagaaagtcattggtagcttgatggggatggcattgaatctataaattaccttgggtagtatggccattttcatgatattgattcttcctacccatgagaatggaatgttcttccatttgtttgcgtcctcttttatttccttgagcagtggtttgtagttctccttgaagaggtcttccacatcccttgtaagttggattcctaagtattttattctctttgaaacaattgtgaatgggagttcactcatgatttggctctctgtttgtctgttattggtgtataggaatgcttgtgatttttgcacattgattttgtatcctgagactttgctgaagttgcttatcagcttaaggagattttgggctgagatgatggggttttctaaatatacaatcatgtcatctgcaaacagagacaatttgacttcctctcttcctatttgaatatcctttatttctttctattgcctgattgccctggctagaacgtccaatactatgttgaataggagtggtgacagaggacatccttgttttgtgccagttttcaaagggaatgcttccagcttttgcccattcagtatgacattggctgtgggtttgtcgtgaatagctcttattattttgagatatgtcccatcaatacctagtttatttagagtttttagcacaaaggctgttgaattttgtcaaaggccttttctgcatctattgagataatcatggtttttgtctttgattctgtttatatgatggattatatttattgatttgcatatgttgaaccagccttgcatcccagggatgaagccaacttgatcatggtggataagctttttgatgttctgctggattcggtttgccagtattttactgaggatttttccatcgatcttcatcagggatattggcctgaaattctctttttttgttgtgtctctgtcaggctgtggtatcaggatgatgctggcctcataaaatgagttagggaggattccctctttttctattgattagaatagtttcagaatggtaccagctcctccttatacctctggtagaattcagctgtgaatccatctggtcctgatggatttttttggttggtaggctattaattattgcctcaatttcagagcctgttattggtctattaagagattcaacttcttcctggtttagtcctgggagggtgtgtgtgtccaggaatttataaatttcttttaggttttctagtttatttgcatagaagtgtttatagtgttctctgatggtagtttgtatttctgtgggattggtggtgatatcccctttatcaccttttattgcatctatttgattcttttctcttttcttctttattagtcttgctagtgatctatcaattttgttgatctttttaaaaaaccagctcctgggttcattgattttttgaaggagtttttctgtctctatctccttcagttctactctgatcttagttatttcttgtcttctgctagcttttgaatgtgtttgctcttgcttctctaaattgtgatgttagggtgtcaattttagatctttcctgctttctcttgtgggcatttagtgctataaatttccctctacacactgctttaaatgtgtcccagagattctggtatgttgtgtctttgttctcattggtttcaaagaacatctttatttctgccttcacttcgttaagtacccagtagtcactcaggagcaggttgctcagtttccatgtagttgagtggttctgagtgagtttcttaatcctgagttctagtttgaaagcactgtagtctgagaggcagtttgttataatttctgttcttttacatttgctgaggagtgctttacttccaactatgtagtcaatttttggaataagtgtgatgtggtgccgagaagaatgtatattctgttgatttggagtggagagttctgtagatgtctattaggtccgcttggtgcagagctgagttcaatttctggatatctttgttaattttctgtcttgttgatctgtctaatattgaccgtggggtgataaagtctcccattattattgtgtgggagtctaagtctctttgtaggtctctaaggacttgctttgtgaatctggtgctcctgtattaggtgcatatatttttaggatagttagctcttcttgttgaattgatccctttatcattatgtaatggccttctttgtctcttttgatctttgttggtttaaagtctgttttatcagagactaggattgcaactcctgcttttttttgctttccatttccttggtagatcttcctccatccctttattttgagcctatgtgcgtctctgcacatgagatgggtctgctgaatacagcacactgatgggtcttgactctttatccaatttgccagtccatgtcttttaactggagcatttagcccatttacatttaaggttaatattgttatgtgtgaatttgatcctgtcattatgatgttagctggttattttgctcgttagttgatgcagtttcttcctagcctcaatgatctttacaatttggcatgtttttgcagtggctggtactggttgttcctttccatgtttagtgcttccttcaggagctcttgtaaggcaggcctggtggtgacaaaatctctcagcatttgcttgtctgtaaaggattttatttctccttcacttatgaagcttagtttggctggatatgaaattctgggttgaaaattcttttctttaagaatgttgaatattggcccccactctcttctggcttgtagagtttctgccgaaagatgctgttagtctgatggacttccctttgtgggtaacctgccctttctctctcgctgcacttaatgttttttccttcatttcaactttggtgaatctgacaattatgtgtctttgagttactcttcttgaggagtatctttgcggcattctctgtatttcctgaatttgaatgctggcctgcctcactagattggggaagttctcctggataatatcctgcagagcgttttccaacttggttccattctccccatcactttcaggtacaccaatcagatgtagatttggtcttttcacatagtcccatatttcttggaggctttgttcatttctttttactcttttttctctaaacttctcttcttgcttcatttcattcatttgatcttcaatccctttcttccacttgattgaatcagctactgaagcttgtgcatgtgtcacatagttctcgtgccatggttttcagctccatcaggtcatttaaggtcttctctatgctgttttttctagttagccattcgtctaatgttttttcaaggtttttagcttctttgctaaaaggttcaaacatcctcctttagctcggaggagtttgttattactgatcatctgaagccttcttctctcaacttgtgaaagtcattctctgtccagctttgttccattgctggcgaggagctgcattcctttggaggagaagacgtgctctgatttttagaattttcagcttctctgctctggtttctccccatcttattggttttatctacctttggtctttgatgatggtgacgtacagatggggttttggtgtggatgttctttctctttgttagttttccttctaacagtcaggaccctcagctgcaggtctgttggagtttgctggaggtccactccagaccctgtttgcttgggtatcaccagcagaggctgcagaacagcaaatattgcagaacggcaaatgttgctccctgattgttcctctggaagcttcgtctcagaggggcacctggccgtatgaggtgtcagtcggcccctactgggaggtgcctcccagttaggctactcaggggtcaggaacccacttgaagaggcagactgtccattctcagatatcatattccatgctgggaggacccctactcttttcaaagctgtcagacagggacatttaagtctgcagaagtttctgctgtcttttgttcagctgtgccctgcccctagaggtggagtctacagaggcaggcaggcctccttgagctgcggtgggctccacccatttcgagcttcctggctgctttgtttacctactcaagtctcagcaatggtggacacccctcccccagcctcgctgctgctttgcagttcgatctcagactgctgtgctagcagtgagccaggctccgtgggcatgggaccctccgagccaggcctgggacataatctcctggtgtgccgtttgctaagaccattggaaaagcacagtattagggtggggagtgtcctgattttccaggtaccgtcagtcatggcttcccttggctaggaaagggaattccccaaccccttgtgcttcctgggtgaggtgatgccccaccctgctttggctcatgctccgtgggttgtacccactgtctgacaagccccagtgagatgaacccggtacctcagttggaaatgcagaaatcacccgtcttctgcatcactcacgctgggggctgtagactggagctgttcatatttggccatcttggaacctccctttccaagttctttattacagagtgggtcactgaaacttcatggaacaaattggaaattatcttcttaattaatgtcactgtctaccatgtatgggaatttggtaaatattatatggtttcaataacatagtagatagaacattgtcaaatctaaacttcagtgaattgtaacagatcccacctgaaattctaaagaaaacagaattctaattgaagaggttaaacttttacagggaatgtcaactgccatttgggtcctgtaaacaaaaaactgttttttaaaaaagtaaactttaaaagtattttcagatgacctcatttgctatccaagtggcttgagtatgcttgatgctaagacttctttgttacagactggagatgtgtgctactggggcagtgttgctctgtgacaaggaggcagaggatgagggcaaggttcgatgtgactgtgaattctgggtggctctggctatcgggagccttcattgattacagcaaaacagttgctttcctagggcaatagtgtctctgtcacccaggctggagttcagtggcatgatcaatcgctcactgtagcctcaacttcttagactcaagtaatcctcccacctcagcctcccaagtagctgaaactacaggtgtgcaccaccacacctaatttttttaatttttaagtttttgtagagacatggtctcactgtgttgcccaggttgatctcgaattcctgggctctagtgatcctcccgcctcggcctcccaaagtgttgggattacaaatgtgagccactgcacctggccctttgcaaccttcttgacaatgcattcctttattccctaactggaagtaacttctttctctttataaaattgtatctgtaccttttctgggtcatttctacctttatattctagttacgtatgtcctacctccctcctagggagggaggtaagtaagactggaaagtagacttcatgtgtgatgaatgaatgaacaaaaggaagtctaacatatggatatagtcaactggatgcaaattaaaaatttttaaatattgatttgcaagatttcattaaggtcaactcttaatagtttgtatcatatatgttaggaaccaaatattaataacttcttcagcattaccattatctttataggactgtctaaaatgagcagccatatctttaaactgtgttttctctgattacacgctcacaggtaaaacccaaaggggctgggaacaaacaagacttttttttttttctgtatgcctgaattatctgtactgttgcttgttttcccacctttggccatagaaacttagttctaacatgctacaatttttgcagttctttctcttagaaaaagaccacattgtctgaaatttcatccatttaagtaatcaagccttaaagttgaaggatcttggtcatgattaatctagacctacaaagtagtatcttaatggcactccttttagaaagttaggttccaggacacacatagctgcagtgtccacattttgtaagctccttcgttgtcacagccactctcttctctgtggctgatattctaaaactggcaacacatcctgatggtaaaagcttggttcaggagacaggtgacctactagctttatggcatttgacaggttacctaacctctctgacgcataattgcctcatctatataatggggataataatacccatcctgtctccttgtaaaaatcaaattagatgacgcctgtgaatgttctatagtctcttagacaaatgtaagttatgactacagcaagagtaaaagagcatgttgttatggacattctttcagtgaaatgtctaagacttgtgagtcacacttaaagctaaacttgatatctacttcattgattttctttttagttctatgtactatattgaatttcctgacagtggggctatgaaagccttcctagcattttatagatgtggttgaattaatggctgtaagccttaaagcagaattagacagcatcaatgaatttattaagtataaataaatatataatctgcttagcaatattacacagcctctttatcttatgtgtgataaagagtcatccgaaggttgaaaatgaagaattgtcctggaagctcttacttaatcttttattatttcctaatacagtatataaaattactcattgaaagcttagcagaataagaaacaagaagttaaaaggctgaaaactacaaattttgctattattattgttattacttcccaagtctcttattgatctgttagaaatagagctacacaggaaattgtaggacagttagtatgtggtagtgttatctgctttttaattattcaagtaaggttttattccattagaggaactcaagaagttggtcatggctgataattgctatctgtcaaattccttagagcagggatccgcaacacccaggccatggattgttaccagtccctggcctgttaggaaccaggctgcacagtaggaagtgagcggcgggtgagcaaacattgccatctgagctctgtctcctttcagatcagcagcagcattagattctcatagaagcatgagccctgttgtgaactgcacatgcaagggatctaggttgtgtgctccttatgagaatccaattccttatgataatttaactgatgatctaaggtggaaccatttcatcccaaaaccatccaccctgctactcccagaccgtggaaaaattgtcttccacaaaactggttcctgctgccaaaaaggttgggaccactgccttagagtttataatttggggttagcacagcctatatttacctgagaatttcaatgggttcactgatctttccaaatgaaaaggcttcttacgaaaattatatccaaactgtcttttctcttagtttaataaacctatcagtaagtttttactgagtactgctattacatttttctctgttaagcattatgggggctcagacatgatccattccctcaaagaacttacctttcagctgaagactgactagaatgagcaaatacggttaacaattaacaagtgagtaggccagctcggccaacatggtgaaaccctgtctctactaaaaatacaaaaattagccgggcatggtggtgggcgcctgtaatcccagctacctcctgctgaggcaggagaattgcttgaacccaggaggtggagattgcagtgagccgagattgcaccattgcactccagcctgggcgacagagcaagactctgtcttgggaaaaaaacaaaacaaaacaagtgagaagggaatcaagtactacgtaagatgtaatgtggaattttagggaaggaaggcagtgtatgctggagtaattagagaaaggggcatgcatgatttgatgcttgaactggatcatgaaggataagcaagattttggcagcaagtgagagggagagaggagtttgtcagaggaatggaacaagtcaggaggcagtaatgtgtacggcactccaaggactctgtcctgatcggagcagaagtgatgaagcattgagtagtttgagaaagttagctaagaagggtgagggcagatgttggagagagttgagtatcagagagaagacattagatttgagcagatagaacaaaaatgccattgccagtttttgtgtaagagaatagtattagggtggttacccaggaagtggtcatcagagttgaatggagcagaaagagtgtctgatacagcatcgggacgttgtggtcacaaaatgaggtggtgagggctgagccaagatggtggcagtgggatggataaaaagggatggccaggacaaatattttaaaggaaaaattaacaggacatctttactgactggattggaaggctatgcaggaaatatattgtcaaacttgattccaggatttctatcctatgcctgggttgcccaaaatatcagggaaccattgttagaaaaggtaggagataccactgttccaacaaaaagtattgagtttggtgttgcacccacttaacttcaaggccttacaagtgagtagacagttagttagaattgcagaagtgccactcagagagcagggcttgcaatgtggggttggactttgtcaccattgtgttaattcctaattctatgcagatgctcagcttgaggaatacccatgtttgggcttcagaatgaaagccaagtaatatttactcagatgccaattttccctctgaaatatttgctcatggaactgagagaacaatatataaagcattaattatttttctcataaagttattaataaaaagataagatcagtgaaaggcagagtaaactagaagccaagtatagaaaatggtatcattcaaagactcattactgtagtggtgaaaacaaaacaattttccaacagcttaagatgcctcagtattttggaccatttttaagtagttagtgtgggcacttagtaaatatgtattaaactatagttcattaattcttttttttttttttttgagatggagtttcactctggtcacccaggctgcatttttgctttcttagtgatatataaaatgtcgagtttcacaatgatggtatcttagatttgattaaatatggtattaaaaaatagctgatcacagaaagtctctaccagtgtgatgtagatggctaaagtattccacatttgcaaacttttattgacctaaataagaggtgccccttgggttgtttttatttggactgggaatattaggagaaagctttttcattcagtgtgtaagtacaatctaccagaaatagaaacccccatggacgatctatttctttgatggtacaggactcagaacattcacaaagatttagttgttagcggaatagacatctgtattttattcaaaccaattttcccttcctaatctgagaacattgtgcaatctaagcagttctaagcatgtttgctattcgtgcaaagtgagagtaaatctaaaagaaatttttttgtgtgtttagggatggtaataaagtctcttagtggttgaaaatgttatttcttacaaaagtggagaacatttgcttttcaataccagagttttcagccatttctgcattctgacctattgactggaggtaggttgcctttgaattcagtaaaacttcatgggcagaaacacagttccttttcctacttatttggatatcatgatggccattgcatgtatgtgtctttttgtaagtccatgcctcagaactgagaagtaggaataaaattagggtcagggctggggatgctactctttgctgctgagaaacacaatgcttcaggtaagtgattctgaagtccttcaccacctgacggtaaccttgggttggtccataggtatgttttcattttgcttgttcatccattttaattggcttcctagagcatgcttgtagatgtagagccaaatttagagtagagcaaccctctggcaaacaggaagagattaattttgtggtatgcttttaagggacttcccaggaaacttcaaaagcagaaaaagaagcactagctgcctattccaaaatgtgtaaaacaccactcagctttttaaaagtaggataaactcagagcgcgcgcacacgcgcgcgcgcacacacacacacacacacagagagaacatctctagtaaaaagaaaagttgagctttcttagctagatgtgtgtattagccagaaaaagccaaggagtgaagggttttagagaactggaggagataaagtggagtctgcatatgggaggcatttgaaatggacttaaatgtctttttaatgctgactttttcagttttctccttaccagacacattgttttcatgacattagccccaggcatagacacatcattaaaatgaacatgtcaaaaaatgatttctgtttagaaataagcaaaacattttcagttgtgaccacccaggtgtagaataaagaacagtggaattgggagccctgagttctaacataaactttcttcatgacataaggcaagtcttctatggcctttggtttccttacctgtaaaacaggatggctcaatgaaattatctttcttctttgctataatagagtatctctgtgggaagaggaaaaaaaaagtcaatttaaaggctccttatagttccccaactgctgttttattgtgctattcatgcctagacatcacatagctagaaaggcccatcagacccctcaggccactgctgttcctgtcacacattcctgcaaaggaccatgttgctaacttgaaaaaaattactattaattacacttgcagttgttgcttagtaacatttatgattttgtgtttctcgtgacagcatgagcagagatcattaaaaattaaacttacaaagctgctaaagtgggaagaaggagaacttgaagccacaatttttgcacttgcttagaagccatctaatctcaggtttatatgctagatcttgggggaaacactgcatgtctctggtttatattaaaccacatacagcacactactgacactgatttgtgtctggtgcagctggagtttatcaccaagacataaaaaaaccttgaccctgcagaatggcctggaattacaatcagatgggccacatggcatcccggtgaaagaaagccctaaccagttttctgtcttgtttctgctttctccctacagttccaccaggtgagaagagtgatgaccatccttttccttactatggttatttcatactttggttgcatgaaggctgcccccatgaaagaagcaaacatccgaggacaaggtggcttggcctacccaggtgtgcggacccatgggactctggagagcgtgaatgggcccaaggcaggttcaagaggcttgacatcattggctgacactttcgaacacgtgatagaagagctgttggatgaggaccagaaagttcggcccaatgaagaaaacaataaggacgcagacttgtacacgtccagggtgatgctcagtagtcaagtgcctttggagcctcctcttctctttctgctggaggaatacaaaaattacctagatgctgcaaacatgtccatgagggtccggcgccactctgaccctgcccgccgaggggagctgagcgtgtgtgacagtattagtgagtgggtaacggcagcagacaaaaagactgcagtggacatgtcgggcgggacggtcacagtccttgaaaaggtccctgtatcaaaaggccaactgaagcaatacttctacgagaccaagtgcaatcccatgggttacacaaaagaaggctgcaggggcatagacaaaaggcattggaactcccagtgccgaactacccagtcgtacgtgcgggcccttaccatggatagcaaaaagagaattggctggcgattcataaggatagacacttcttgtgtatgtacattgaccattaaaaggggaagatagtggatttatgttgtatagattagattatattgagacaaaaattatctatttgtatatatacataacagggtaaattattcagttaagaaaaaaataattttatgaactgcatgtataaatgaagtttatacagtacagtggttctacaatctatttattggacatgtccatgaccagaagggaaacagtcatttgcgcacaacttaaaaagtctgcattacattccttgataatgttgtggtttgttgccgttgccaagaactgaaaacataaaaagttaaaaaaaataataaattgcatgctgctttaattgtgaattgataataaactgtcctctttcagaaaacagaaaaaaaacacacacacacacaacaaaaatttgaaccaaaacattccgtttacattttagacagtaagtatcttcgttcttgttagtactatatctgttttactgcttttaacttctgatagcgttggaattaaaacaatgtcaaggtgctgttgtcattgctttactggcttaggggatgggggatggggggtatatttttgtttgttttgtgtttttttttcgtttgtttgttttgttttttagttcccacagggagtagagatggggaaagaattcctacaatatatattctggctgataaaagatacatttgtatgttgtgaagatgtttgcaatatcgatcagatgactagaaagtgaataaaaattaaggcaactgaacaaaaaaatgctcacactccacatcccgtgatgcacctcccaggccccgctcattctttgggcgttggtcagagtaagctgcttttgacggaaggacctatgtttgctcagaacacattctttccccccctccccctctggtctcctctttgttttgttttaaggaagaaaaatcagttgcgcgttctgaaatattttaccactgctgtgaacaagtgaacacattgtgtcacatcatgacactcgtataagcatggagaacagtgatttttttttagaacagaaaacaacaaaaaataaccccaaaatgaagattattttttatgaggagtgaacatttgggtaaatcatggctaagcttaaaaaaaactcatggtgaggcttaacaatgtcttgtaagcaaaaggtagagccctgtatcaacccagaaacacctagatcagaacaggaatccacattgccagtgacatgagactgaacagccaaatggaggctatgtggagttggcattgcatttaccggcagtgcgggaggaatttctgagtggccatcccaaggtctaggtggaggtggggcatggtatttgagacattccaaaacgaaggcctctgaaggacccttcagaggtggctctggaatgacatgtgtcaagctgcttggacctcgtgctttaagtgcctacattatctaactgtgctcaagaggttctcgactggaggaccacactcaagccgacttatgcccaccatcccacctctggataattttgcataaaattggattagcctggagcaggttgggagccaaatgtggcatttgtgatcatgagattgatgcaatgagatagaagatgtttgctacctgaacacttattgctttgaaactagacttgaggaaaccagggtttatcttttgagaacttttggtaagggaaaagggaacaggaaaagaaaccccaaactcaggccgaatgatcaaggggacccataggaaatcttgtccagagacaagacttcgggaaggtgtctggacattcagaacaccaagacttgaaggtgccttgctcaatggaagaggccaggacagagctgacaaaattttgctccccagtgaaggccacagcaaccttctgcccatcctgtctgttcatggagagggtccctgcctcacctctgccattttgggttaggagaagtcaagttgggagcctgaaatagtggttcttggaaaaatggatccccagtgaaaactagagctctaagcccattcagcccatttcacacctgaaaatgttagtgatcaccacttggaccagcatccttaagtatcagaaagccccaagcaattgctgcatcttagtagggtgagggataagcaaaagaggatgttcaccataacccaggaatgaagataccatcagcaaagaatttcaatttgttcagtctttcatttagagctagtctttcacagtaccatctgaatacctctttgaaagaaggaagactttacgtagtgtagatttgttttgtgttgtttgaaaatattatctttgtaattatttttaatatgtaaggaatgcttggaatatctgctgtatgtcaactttatgcagcttccttttgagggacaaatttaaaacaaacaaccccccatcacaaacttaaaggattgcaagggccagatctgttaagtggtttcataggagacacatccagcaattgtgtggtcagtggctcttttacccaataagatacatcacagtcacatgcttgatggtttatgttgacctaagatttattttgttaaaatctctctctgttgtgttcgttcttgttctgttttgttttgttttttaaagtcttgctgtggtctctttgtggcagaagtgtttcatgcatggcagcaggcctgttgcttttttatggcgattcccattgaaaatgtaagtaaatgtctgtggccttgttctctctatggtaaagatattattcaccatgtaaaacaaaaaacaatatttattgtattttagtatatttatataattatgttattgaaaaaaattggcattaaaacttaaccgcatcagaagcctattgtaaatacaagttctatttaagtgtactaattaacatataatatatgttttaaatatagaatttttaatgtttttaaatatattttcaaagtacataaaatctgggggttctgggtttttttctctttactgtaaaacaaacatgaaaacgtgttttattataaatacgtgtgttccttgctttaagactaatctgactagttttagtaattaaacagccctccagagaggatacttatttgaaagcctgggaggccaatcctgcagtctgtgagcttctgagaagttgtaggattggatctgtcttccatggtggaagatgggagtgtcattttctcggacacttgaaagttttacccctttgaagtgatatactttcatcagataccaaaccatgtatcctagcaacatcaggatccacgaatcacggctggctggctggctctatttgactataaaataactgttaaaaaaaatcaaagtaggtttacttagggataatgagaataaattggcccaaatttagaaagtcaagtactggggaaaaaagtaaaaaaagaaattcaatatttggagacaggtcacatatcctcggtttggaagtggtgccatttgcagtatgtatttgtatccatagcactgatttaatttttgtacgtggagcacacagattttatatcatagtacccacaatctaacagattgctaggatttctaaaaggatttgcctccgtgatggctgccaagccgctgggtaatttagttaaagtgtttaaagttatcactaaatcttagggaaataaatggaaggattttaaatcagagaaggggccattaaggaaaaaaagcatctgttcttactcttcagcctccccatttgaacactgacaacccatcccataacgtggtgaactatatctgtgcaatgtatcatttctatttctaaacatacacacatggtttcctcttgtattgtcttataaataaggatcaggaaagtcataacaaacattgacttgtgttgtgtatatggaaaaacagatcgaatgagatgaattactctatcctaatctgtccagtgaacttgaaaagtactctaagagaagcccttgactgccagtcatgacagcccagccatggacttagaactttgataaacttcaggcttgaccaattttcatagtcagaggactaaaatattttttaaatggttgagtaaaaaaagtaaaaattaaacatgacatccaaattacttgaagttaaacgagtttggtaaacatgactgaaagttttcattagaagatgaggttggagaaaaaaacaaaatagagacatctactaaattatcctacttggagttaataggagtaaccaatgtgtactgcattcattgagtaagcagttaaacttgtttaattactaagatgccaggaaataactcagatcattgctttgatctgttgtttttcaccatactgataagcctctgtggtcattagctgtgtctatgaaatctttttatgagctgtactaattcagtgaataataagacagttcgaaatgagaatctgaactaagtcttagaatgggtcagtgttaaattgttcctcattcatttaagtgacttctagatctggataaaatgtcaaacactttttgaactgcaacaaatggcttcaggcattgcctcagttcagccagcactcccaatagtgttaaggtttaaggttattgtaaaacatacttgtctccatcatgttctaacatcaagcctggtctacaagttaaagtagaaatggctgcatattttgataagccattgttaaataaagactgttaattgggataagaaacaatatacgtgtacataaatttaggaagatgaagcatttagcttgcaaaaagccattcacagatttgatccaacctcagaatgttgaccagcaaaattagtattttatggaacataggccatccttttagctgtgggtttttaaactgtggttttaaaggttggttggctgcttggtttggtgacaagcgggggtaatggttgggaatctgacttttgttggttacattgaactaactggtggttggtgaactccccacctaatagctaaacttagcaactagagtaggtgaagccactccaaaccagcccatgtttatggacattccttctaataaacacactgcctgcatgtctatccccaatcttgtgagtatgatcatccattctctcaattctggccaccatttgaattatttgtagggaaaaaaaagcaaactccttgctttttaatatgtgattatttgcagtaaattacttgaagactatgtttaaatattaacagaaaaagcactgtgatcttacacattatcataattgagaagacccatttctgtggcactctgtaggatttccataggcctttacctcacccccacaccctaattatttacaaggcacagaccaccagattaggagctccccagcctggcatttgcttttctaacaacaatcctgtgtgcttggtaatgtcagtagcatggaattgtaaaaagcaggccttccaattaaacctcaccacacaaacaataaacaagacctttgcatttaagtgtgagctgctattttatatctggaaaaacaaaagtcctttcctttagaaaaataagcttatctgtcctgaaaaaagcctcacacataatgttgtagttaatgacaggacttgtctcaagcctgtaaatgaccaaaaagtgttagttgaaatcctgagcttgaggtgtatgttctacatttagaaaggacataaagatgcttctgcagctctgcactttggtactgtactctatttcaaatggttccttagaaaccaggggctggtctgcatagaatggctgaacccaggggaaatatttttgtctggcttaagtgctcacaatttgaaaaaatccatgtcaagtactgcagtacacatttaaatttatttagtgaagctgcattctccattgagccctaacatttaaaaaatagttgctcaactgggatttggtgcatatcaggaaggaaagaggaaaaagacataaaatagaaaccttacccagcagagacctgctccaacagataccaagcagtgtttacttggagataacagtacccatactctcctccagttagactcatggaatgatctcaaagtgtgttctgcaaccagcatctgcatctctgggaactttttacaaatgcagactctcagttcccatcctagacttactaaataagaagctctgggggtagagtacaacagtctgagttttaacaacccctctaggtgattctgtgcccactcaaatttgaggatcattggactaaggggattaaacagcctttcacatgttctagataataggaagatagcacaacccaagaatttgaaactgtagatctgatcccaatcatgtcactacctatttgcttggccctgaaaacatcaaactatctatgtttgcatttcctaaacaacacaaaagtgatgggtgctcgcaggtggagcaaggcttagtgttgtaagagaagagtgcactgatggtttgaaagtgagcatgcaaatgtgagccaggaaagctcagtgcccttcatagtcaacaatttttttttctttcaaagcaacagcagtagtggattcaggacccagagcacgtagtcgtttgtaacacatttggaacgactgtgagaaatgagaagcaacatgcagcaaattaataaggaaaagattattccatctggggagctggtctctgcacatgccaacacagcccattctctgtgaaatagcgttttataggtcacaaattaaatcagcatcctgaattaatcagctattaacatccagctgaggaaatctaggttcacacctctagaatgaccagactataaatacaaagggcttcctcagactttgtggcaaagcttttctatattgtaggaactggtttctggaaatgaggacctgaacatagctattcccatctctgtgtgtatgtgtatgtgtgtgtgcacactcctgcacattttacaaggcaaattgcattagaagatttttctatttctaggatggaggggagggtgtccaaatgtattacccatccattaggcaatacagaagcctgaattctaacaagcctaccttgggagccaggtatcttggtagttcaatcatcaggttggccaaccctttccggtatctgaacctccatgccctcaactgtcagaggaagagggtgaacttgggggatctcccaagaggatggtcttggaggtaaatttcagttttaatattacaatttcattcttcctacttcattatttgccataaaaagagattaaagaggtttctgaagcacttaaaggctgggaagcattctgagataattcactgtgcatctcctgcctccctccatagctggtgtccttatatcatggtacttgccacaagattaaaagcaggaggcaccttgggttagtgtggcggttggggaggatgtgaccaaaggaaggtttctacttcatatgcaactataaaaatattaccaactgtctgacaagcaggcagaaaataccttggggaaggtgcccatatattcctcaagatgcaaattttctaccagggtctaaccttactttcaaagccaggcaatgtatttacctttgttttatgtcactcattcttactgtattacatggtgcctggcaaggagagattccttgtgttttgccaagttgcagggtcaggaaactctgcatgaaactgctggattagcatcctgtagagtcactgttaacagagctctttgaatgaaatgggtttgcatctctgttctttggggctttataaattcaccaaggatgtacggttcccaatctgtttcaccaccacctcccgagtactctggatagttcctcctcctgagaggatggccttgagaacaaaagtatctcataacaaatcacagcaacaccacattcagcagcagatttcctcagagaaacagcagatatttcagaatggtaaagaggtcattctgagtggagctttggctagcttaggagacaaacctcactggcatgccagtgtttgaaactcctcatttcagcaatccaactttggtttattcctggccctgagtcctttgtgcctgaatctctgagaaatctatgtttttgttcaatccacctctgctcccacttcatgccctgctttccttcctgatgacctcagagctctgcttcctctgggatccaacatctcaccactcagggggcacataatatagtaaagagtggagtctgaatcccaactctgctacaagagctgtgtgactgtaggcaagtcacttaacttctctgtgcctcagttcctcacctgcaaaggacaggtaaaaatattcccacttacctcatgggattttgtgacaattaaatgaggtaatacatataaagcacttaggaaagttacagacccatgagaaagcctcagaaaatgtttacaaactcttggaagtcactctgctgactggtaataagctgggctcatctagtacacacttcagagactcttttctcatattcagactcctggaagagatcccatctcatctgtgccattagcatccagggtcactttgtcttttctggaagactcagagagataactcttgtttacccactagcaataatactgcttggcagttaaactgtggccactacatacactcaagcaaatggaagagatatactacaataaagggtgtttttctagactgtacattccaaatgaagcccattattcctaagtgtctatcccagctgaatggcaatgactgaagccagggtgaaatggatgaactcacatagtctgaaagaaacaaggggccacagtcacatttctaaaaatagacatggcacatcaggaaaatcctacctcaacttctgccccatgtccttgacatacatttaacccattgcacaattatagtgactagtacttactataagcaggcagtgttcaaggcatcttatgcagattttctcactgcacaacaatccataaactaggtggtagttttagtactcccattttagagatgaaaaaaactaaggcacagagaattcaattaagttggcaaaggctgcaacacttgtgagtagcagggcagcctggatctggagccactcttaaaccactgaaaaatttaaaagtgcaaagggcattgagaacatacagaaggaaaaaaaaaaaaaaggccgtggttgtggggaggggggtggaatagctagttacatgtccaagggatttggcttccttcaaaaagggagaccaccagtggtgcttagaatttttagctttcagaagagtcctggattgatcttttaaggttaacatgcaaacagtctttcattgcatggaggcctttccaaaagtggatacaaccctactctgtgctgaaaaacctgaatgtagggtttctagagcttcatgtcagctatttccaatacttggatatggggcagttgtcacccctttaacctcatggacaatctgatgagcttcctgtgaattgctgggattgggcagataggcagagtgttgtggaaccacttgcaagacccaggagtgcccaatcctccctaggtcaatactttacagttattttgtgtttgggattggtggagaagagaaaggataatgactcaggcctgctgggtctgcaatagccctggccaccagcgccagccttctctcccccattcttccatgtatggctgacatcacttgtaagtctttgctgcacctcagcctcacaagtcatgtcaaggtcatgctccactgccaactgaattgaattgaaccaaaagatgaactcagtttgctatcttggctttcccactttcttaagaacagatcccattggtgatggggtagatcaggtagtaaagtcaaggtgctgaggactgatgtgtcccttgagttcagcagaagttagatgcgaaagggtgaagaatgttctataatgagtataaagagttctatcgatgggtttcagacagacgatccatatgcaaagaatcatatgtaaatcaagtaaagggtaagattaccctagcaattggttgaacacaaggacaagtgtttggcaataggcaatactgttacatccctattttgtaccagatgccatgctaaatgctttccatgctatctaaaataatcatgagatagatgtaatttgagagacaagaaaactgacaacacagtagcctaaataacttgcccaaggtcatacagttaataaatgatatagtcagatttgaagccacatctatataatcccaaggtctcgaattttaaccaccagactggtggctctcaatcctgacctgtacatttgaatcacatagggaatttaaaaaatatatctatacccagacgaggtaaatcagaatctctgggggtggggcccaggcatctgtatttcttttttttttttttttttttttgagacggagtctcgctctgtcgcccaggccggactgcggactgcagtggcgcaatctcggctcactgcaagctccgcttcccgggttcacgccattctcctgcctcagcctcccgagtagctgggactacaggcgcccgccaccgcgcccggctaattttttgtatttttagtagagacggtgtttcaccttgttagccaggatggtctcgatctcctgacctcatgatccacccacctcggcctcccaaagtgctgggattacaggcgtgagccaccgcgcccggcatctgtatttcttaaagatctttccagtggttttgttgaccagccagggtagaactgctgctccagattcttcttcctctaggtaaacaggagtcagaggtatcagagatttctgcccatgggactcagagccctaacctggtcccaaacttgggtgtgggattctaatgactgggaattaacaagacaggacgctagttctataggaaattgaatacaagtaggaccctagccatagaaacaagaataatgattttagatagtaaaatcaacattcagagtcagaatggacccaccagaaagctcaatctaacactgagctcctgaacgaggctccttaaatttctttagattccctgtgattagaaacaggagaggcactaatggctgcaggagggctgagtctacagatgaggatctctcatctacagatgaggatcaactgacccagtggtgaggagaagagagctctatgggcttctcacaggcaggtcgtcacctgtcccgcctccaagcaacctgctctgagccaacaacatgtttccacacatttcacactgcttggctcattctgctggactccaaagggctttactaagttgaagcaaagagaaaaaaaaacaatccatgttgactgtttggagtgttttctctgttttcagaagtgactgttagattagtatttggttttatcttctgcatcttctaatatttttatctcctccccatccctacctcaaactgccaagcagtgattcctgcttgacagtaggaaaaaacatctccgagtctcgcagccccttcctggagggcttgttttagaagcagtgcaggacatgcccagcttagccaggccacggggctaatcgaatttggcagatgctctgcgtcagcaggcaccagggtgctaatgccctgggtcagctggtgagagggtaagtgggcaaatgcctggcttcttccccgtgttttcaggacaggaatctgagtcccagtaatcactagcctatgggaccagaggctattttgggccttcttttatccaatggaaagttaggggtggtgacatctgaaactgccaaggagcatccagtttcacccttatccaggacatgtccctagaggaaatggaagcaatgtcaaggagaccaaaacgcgggtgtcagaacttccctttgtttttatttctgtgccgtttgttttcatccattcctttcactttcagctcacctttccactactctggttcaggtcttcattgcatctcgcctgggctatcacagcagccttccaacccatctctctacccccaatctctctaccccaacccacttccaacatcctcccatgatagcagaatgatctctctgaaggttcaatgacaataatgaacatgaaaacacttcgtaatacgttacacaaatagcaacacctacctatacacaaatgtaccgatgtggcaggagagacagaaatgctgtctttaatcactgttgactatgcaggtgtaaaggccagtgcattgcaagggaatgaaatcgatagactaagaggaatgtttctgggaaataatggtctaagttggcacacacagtattggaaccctcaaacgagtcaaaaaggcattcaaggtggacttgcctgcttggcaattgtatgtcactgtgataaacctgatgagagatgtaagatgtagatctaattatgcctatttttcaggtaactgaggctgagagaggcagtaatttgcagaagatcactcagtgagcatatagcagaactagaatataaattcagaggacatatgcttttcaagtgtgccatattgatacagatacattaatgtggatggatggatggatggatggatagatgaatggatgaatagagcatatgatttccctccctttaatatatcaaagggctatccattgctgacagagtaacaaattggtgatattggcattatggccttataggatgtagctttattttcctactttaatgtccagacaacttccaacacacttgacagtgcactccaaccctacttctccctattccctaaatgtaccttacactctacctcctctgcatctttgtccattccctgtctccctctctgattataaaatccctacccaaccataacccataatagggctgccagaaaaaacatcaaaccaaatgaataattgtttaatataagtgtgtgcaaatactctatggaacatatttatagtaaaaaatgatttgtattaatttaaattcaaatttcactgggtgtcctgcaattttaattgtaaaatctagcaaacccacacatcaggcagttgccccatgtataccctctggttttcttctgccatctcaaggtgggatttagcacttcttcgaatttttcatacacaattcactctcactgaataatgagcaatgtgtattttatggaagacttcttaataaatgtgaaaatgaagtttacattccataattgacattttatttttaacagttcttattaaaaatggccttatggctgggcatggaggctcaggcctgtaatctcaacacgttggcaggctgaagcaaaatgattgcttgagacctgaagtttgagaacagcctgggcaacatagcgagaccctgtctctacaaaaaaattaaaaatatatatatatagctgggtgtggtggcatgtgcctgtagtcccagttactcaggaggctgaagcgagagggtcacttgagcccacgagtttgaggctgcagtgagctaagatcatgccattacactccagcctgggtgacagattgagatcccatctctaaaagtcattaagtgtccttttgaccatttccctacacagcatttagtgctgatcacctgctctcactctattatgcagagaagctttcacttttcaaacctaggcactagtccacggcttgtttgtataccatggtagacttatcaaagcaaattttcgattaggcaggtttctcttaacaaatgaattttctatgaatataaaaaatgtttctatatgttaaaggttcaattgcatgaagcctttagcattttcttgggtaaaataattgctcccttactaagctgcagttatttgtataaactcttctagagcagtggacattttcattcacctgtgtacccactgcagttcacctagccatgtaccggaaagcagtcaacaagtgtctattaaattgaatgaatgcagtgtaaggccacattataagtgtatttagccctaagtggctacaacattgtttgcagcagccaaggaagggatcccagcagtcagggaaagcaacttgatagtttaattgagtaattctccaccctagttgcacattaggcatctggggagttttaaaaaaattatgaattgtagaccccatcctgcatccctgcatcaggtaaatcagaatctctgggagtgaagctcaggcatcaatattattttcaaagctcccaggttattttaccaggcaggaaaggttaaaaatgatgaacagttgctggagatttggactagtattcttctctgggtctaatccatgacagaagagagagaccaagataatcagagggagaaatacggatttctttttgcttttccctgttgtagatgttttagagtttacactgttctttcacatgcatgcacatcttgccacatcccacccccaccacatagtctggccactgagccttgagctgtgtgttcactttgtgagtgtgaagaacaacatggctacagccattctatgtaaatatgcaatcttagttttggcttggttgagtattgcttccccaggttcccaactccacttttactgttttaggttctggtttcaccaagaattcagtagctgtggtacttcccgggtatgagagaataaagaacttgtaaagtggaattggccagctttccacacccctaccttcactgcacaccaacctgcactgacatccagaggagaaccaagggaattgtttcctcctggtttggacacattccacttgaagctcctccaggcattgtgaagcagaattcccttcagtatatgtgactgcaaagagatgaatttttgaactggagactttgaaaataaggatgagcatgtacagagtgaaaacatgggcctcgagtcagcagattgaaatccctgaccttgctctgtacgtctctagccacataagctaagcaggtctcccctcacttctttcagctttggtcttctcctctgcaaaaggagtttcttcacccatttgtattgttttaacagaattgctgagactgggtaatttataaagaatggaaatttatttctgactgttctggaggctgggaggtccaagatcatggcaccagcaggttcagctgtctggtgagggctgctctctgtttacaagatggcaccttgatgctgcatttttcagatgggaggacactgtgttctcacatcgaagaagggatgggagagtgaaaatgggccaaactctcatcaagcccttttatagtggcattaatctgtttacctaaacatctcccaaaaaggccccacctcccaacactgttgcacggggaattcttttcaacacatgaattttggagggaccatttagaccatagccaggacgatgcagaatttgaggatcttaaggttccctccagctctaaatacttcatagattctaagtcctgcagcagtacatgagaagtctattgagactccctaaaccattctcaagaaggtaaaggcccagagccctgcctacacatgtgctcagatgatgcactgaaatgagcactagaaaggagccagaaaacaagtccaagtcccacttctgccttgaactcactctgtgtttttgaaaaagtcatgttctttctctgagccttcattgtctcagctgtaagatgaatgttagaatagatcatctctactgttcatttcaactctgccattctagggatgttggatgtcctagtggctgagggttcatattacaataaatatgaaattgaaacataaaacagcactcaaaacatgaaggagaaattgggattaagaaatgagaaaataccttttgtctaagagagaggagtgaaccaaacacaaatgcaagcggacggaaggaagggagagggggagggaaggaggggaacaattcacaaataaaatttaaattctggatctattttatccaatcaaggaaaaatacctataattgcattttaacttaaatataaaaattatatcacatttcagaaaaaatgcttcaactcttcaaatgaacaagtatgttgtttgcaaaatcaacttttttttctgtaaaacctatgtggctttttcagaagagaactaactaggttaataagcccatattccgccaattcttactgacaaataatcaccatgtctcaaagtcttaggtcttattttttcctttttcccatttggtcttttcgcccatttgtcttttaaaaagctatttaaggaccttcaattttagatgcacactctttagcttggtacttgaggccccttgtgatctgacttcacctagggagggttgcaggcctcacctttccctgctctcctgcacatatcccagggtccacttttattgaaccatctattgcctgtttccaaactatacctcacccctctcatccctggttttttgtttgtcctttctcactcctgcttctgcacaaataaatcattcaagactcaaattccatttcttccttaaaactccctctgattttctaagctggaaacaatttcccacaggccctgttgtgaaatccccatccacattatttctatctctctagtggcacttagtgttttcagccctgcaataaggcttctagaatatgactttctggagagcaaggtttgtgtctgaggacagcacacagaacagtgtttatgaggccaggcctggctgtcagacagacctgggcttgacttttggctctgttgctggttgcagggtgacctaagcaggctacttgacctcttaacttcagtttactcctctataaaaggtgaatgctacctacttcataggcttagggtgagacccagggagataataaatgtaaaataactgttaactatagcacttattatatgttggaccctgaaagcacctgatatttgttttttttccactgttaaaataactttatcttgcattttacagaagtctatgaatgatttttaaaaagcacctccttaccccacatcatgtttctctgacagttgttaaagtaggcaatgagtaggtcaacagcttgagcatcagcatcttgcaaagatttcagactaaccaaccactcacgaaagaacttggcagcttttttatcttgtttttaatacaacggtatatcgactctgatggcaaacctgtccagccacatctccacaacacgctttgcaaaatcagtgattagcaaattagttagctttggcaaggaggttgatatttgttaaattcacaacttcacagaaactattaagtaagccacactttatacatgaagaacctgactcccaaagagcttaagggtcttgctcaaaattaatcattctgctagtaagtagctagtctggctccataatccatggtcttgtccactgggctatattgattctattctcttgattgttatttatttattcatttattgagatggagtctcactctgttgcccaggctggagtgcaatggtgcgatcttggctcattgcaacctctgcctcccggattcaagcgtttctcatgccttagcctcctgagtagctgggattgcaagtgtgtgccaccatgcccacttaatttttgcattttcagtagcgatggggtttcaccatgttggtcaagctggtcttgaactcccgacctccagtgatacaccccactcggcctctcaaagtgctgggattacaggcatgagccactgtacgcagcctgattgttatttatttttatctgtgagtaattcacatttattttcttatagaatctagcacaccattggcatgaagtagatgctcaagaaataattatttgaagtgactcgaagaaactcacctggttagatgaatttgtgctgttgtaagattagccacttgaatgacatgtttgtagggagccaacaaacaactggtgagcctggggggctcttctggtttccctccttgggctcatctctacagcttccttaagtgagcctaagatacattgctctagccctggaaagaaaagatttcattttaaaaattgttctttttccaaggaaatgtcaacaatactaaacacacccacatatttcagagaacgaataatgacagaaaaaagattactattttgctgtgtgaccttaggccagtcattttgtgtccgttagacgtagtctcctcgtctgtacaatggcagggctgaacataatgatctttaagcttcagccttttgtgattccaggttgttatatgtttttttcttcttttgatatctcaacatatgtcttaaggcacacaggatgcagaaatgtagaaatttgatttatataggctatatttgcacaatgcaaagaacaaaacagaaatagaagcatttttgctcatagagttattatttccacaactactcataaatttgcacagtattagtagtaacagcacctcctgtaaatttaaaatacttttgcatttatacaggcttttagagatttttcaaagcctttcactccattgttaagaggtctccagactgttgaaaaacatcccaacaaaaacatgaaagacagatgcatagaaagcttgaatgttatctgtacatctagcgtttattaaacatccattatttctaagttctgtaaagaaacttgaaagacacaccctagactcaaaactcctgccacttaaaaagtaagacatgcaaacatatgcagctacaaattaagagtatgaaaatactgtgcaaacaatggccttcccgaaaccgcttttgcaaaatgataactaaggaaattatgacagtgaaagatatcagacataaccaactccatcttgcttccaacctctaaactgtccttgtccattcctgggcgtaggctgaactaaccttgggaaggaatttagtttatagtttaaataatagcccttccccaaaactaaactgttcttataaaatgaaggaaaggccaccagccaccaagttagaatgagaggggctggaattctagatattaccagccattattccggaggtcataagatttgcaacttccccagttactcttaaaggtaacatcagccttttgagatgtcttttcaggtttctgtatttctaccaactggacggccccacctggacctgccaaccagttctgtggtctccacccaggaactgactcagcataagagaagagctttgactccctgttatttcatccctgagccaaccaatcagcactcctgattcactggccccctacccaccaaattatccttgaaaactctgatccccgagtttttggggagactgatttgagtaataataaaactccagtctcctgcacagctggctctggctgaattactctttctctattgcaattcccctgtcttaataaatcagctctgtctaagcagtgggcaaggtgaatccattgggtggttacaaatttcgaggctcatccaggattgcccttgtggctacctgcccgtggttcagtagccccctccagcaatggatccaggggccagcccaagcagccacctagttcacttggactgggagttgactctggtactctctctactgacagggcactcccgacccaatgggcatggatttaatagagaaacagtcctggggagacgtcccataactgtagccctatcacagggtgtctgtctatagccccattgtagggtgtctgggttggtgagtatcctaggtgctgccaatgtctccttccttttcgcaactagttctgtagctccattgtgaggtgtctgtagctacaacatggggtgtctgtcttggtttggctcctggggggtctcggttggctctgcctaactagtaaaaagagtcttggttcgggagacttctcctcaatcaagaagatttcagggagatttctcaaacagagaataggaggatagtttggaagagatactctggaattcttggttaggaatcttgatttggaaagccttctgtctgtcttgtctatatgtgtgtatttgtatatgtggaggagatctctgaaggaattgctgatggaagtctagcaggcctaactcagagaactctccttatctatctggtcacattcagtgagtcctgaaagaagtttaacagccctggatcgggtttgtgactgctcttcatcttgcccagagatcacccattgaattcccagatggaggtcaccattccccactttgtgtagatcaaagacaacagggaccaacgggaaaaagttcgagtcttgccaggtcgatgttgggtgctgaacaaggtgaccaatgtctgtagcgttatgtgtattttgcttccactggaatggaaaatgttaatttggttccccatgtagcccatcaggcagcatcttgcaacattgagaagcttttgcctatggttccataaaacagaaaaggatcattttcttttgtaatggggcttggtcccctcacgtctatggcacggtgaacagggccatcaaatgctgctccattcttctagaagctgcagagaaaggggacccagaaacctgatatgctggcacaaagggcaagaattcttaccagaaaagtgtctggcctctctctctctctttctctctgtctctctgcattgtgtgtctgtgtgagtgtgtgtgtgtgtgtgttggaggggggcagtggtaagcaataaatgtcactgtgtgtctctgcaaaggtttgatgaatagtaaaaaaggatttgtgagactagtcttaggctgtggcaaatctggtgcactttgtactaagaatttgtccttccgtaatggagagaagggtgtcacaggatagaacatgagtttaggacccctgtaatcctgcttttcaagccaacccggcaggctggtcagttataaactttgttgtgggtccctgaaaccaataccagatgaaatttctgtcttgttttgtgtctttaagagcttaactttgtgaccatgtagaggtacttcatcctggtctccaccatccagaggacaggaatttgggggttcatatcacagccctaagaattatcttgagcacttaaaagcctttgcaagcttcagatcagctgctgtagacttcttcgggggagagcagtagaaactgctcaatgctgtgtagctcagtagctaaggtttttatctcttgacaatggtggcccaggttcaattcttggcttacagaatgattcctttctggtttgttatttgtggaactttgccatttattgaggttttttttttttcaccccatagatagcttctgatttcctgtcttgaattttcctttcactgtactacctttggggatattctaaatcttgtttttaaaaaaaaaaagctgcttaccatctctttaaaacaccttttgtatccatggttaagttataaccttaattaaaacttactaatttcatgtgggcggttacctggggtagaattcaaaggccagaaatattggctgtcctgactagagtctggtaataagagatttaaaagagattttctttaaacaaaagagctctatggttaaaatttgcttaattaaacatgaatatccaagctatatatatttaaaagaactttatcttttttctctttgctctgcattaagtactctttctctattgcaattcccctgtcttgataaattggctgttacatttccaaagcattctgggaacaaggctataggacaaaaagtcattctagaatttttctgccttaataagaattgagagaggaaaaagaaagaaaccggtcaggcaggcagttaggatgggccctggattgaatttttagaaacaaaagaacagcctgcaggcacagataagggaacttacactgggggacttgcctaagacatgcccacagctgcacagataagaaaggctacacaggtgacttgcccagacatgccagcagtggaaaatttcatcccctgacacatgcataataagggcaacaaagcaatatgggtaactcaagctaagggcccacatgcaccttaggaggatggggtggagctaccagaaaaacatgccttatgcaaacaaaatgcccagccctcatcagtttcctataaaagcctttgcattcaactgtgaaaaacagcaatcctcttccaggtcccctttctgcaacagagagctttcttcattcacttattaaactttcactccgacctcaccctttgggtccatactccttaattctcttggtcttgggtgatacctcacaaggagagactgctacattgtggtgcattggtgagactgtaacagactcctttccaagtgtttggtgtctgagttttcagaaggtttgacatgcatttcttcatttaatgcttagaacagaccaccaccaataataacaactccacatcttatttttcagatggggaaactatgattcagaatgataacaattaatacaaagctgaagcaagattcaaatccaagtcttctgacttgaaatcctactttcttgccactttttaaactatttatctgatgttggcaattcatggcaatcagaggatggatgaagggctctggaggttttggttacagtcagggagcattagaaagaacaagtgtgcttagatgaggcgggaaagcccaggtacatgaaggaaaagaataatttgcctaagttgcctagtttaaaatcatttttaattggaaaggtatttttatcttcatttacagatgtggaaactaagattcagaatgattattcaaaaatcacatagctagtggcaacctcaaggattgaaaccaggtgtgtctatctctaaatatagtgataaaaagcatgcattttgggttgaactctgctctccacatagatcttggtccagcccgccccctaaccctggtgtcctcatgtgaaatgaggctaataattgccaggcctctgagcccaagccaagccatcacatcccctgtgacttgcacatatacgcccagatggcctgaagtaactgaagaatcacaaaagaagtgaatatgccctgccccaccttaactgatgacattccaccacaaaagaagtgtaaatggccagtccttgccttaagtgatgacattaccttgtgaaagtccttttcctggctcatcctggctcaaaaagcacccccactgagcaccttgcgacccccactcctgcctgccagagaacaacccccctttgactgtaattttcccttacctacccaaatcctataaattgccccacccctatctccctttgctgactctcttttcagactcagcccacctgcacccaggtgattaaaagctttattgctcacacaaagcctgtttggtggtctcttcacacggacacacatgaaatttggtgccgtgactcggatcgggggtcctcccttgggagatcaatcccctgtcctcctgttctttgctccgtgagaaagatccacctacgacctcaggtcctcagaccgaccagcccaacgaacatctcaccaattttaaatcaggtaagcggcctcttcttactctcttctccaacctctctcactgtccctcaaccactttctcctttccactcttcaatctctcccttctcttaatttcaattcctttcattttctgggagagacaaaggagacacgttttatctgtggatccaaaactccagcaccggtcacggactgggaaggcagccttcccttggtgtttaatcattgcagggacgcctgattattcacccacgtttcaaaggtgtcagaccatgcagggatgcctgccttggtccttcacccttagcggcaggtcccgcttttctgggaaaggggcaagtaccccaaccccttctctccttgtctctaccccttctctgcttttctgggggaggggcaagtacccctcaaccccttctccttcacccttagcggcaagtcccgcttttctgggggaggggcaagtacccttcaaccccttctccttcactcttagtggcaagtcccacttttctagaggaggggcaagtaccccaacctcgtatctctgcaccccaatcccttatttctgtgccccgaccccttatttctgtgcccctaccccttatttccacgcctcatcccttatttccatgccccatcccttatttctgtgccccatcccttatttccgtgccccaaccccttatctctgtgccccaacccctttttccacttttctggaaggtaagaacccccaaacctcttccctctgtttctctactctcttctctaggcttgcttccttcactataggcaaccttccaccctccattcctccttctactcccttggcctgtgttctcaaaaacttaaaacctcttcaactcacacctgacataaaacctaaatgccttattttcttctgcaatgccgcctgaccccaatacaaactcaacagcagttccaaatagccagaaaatggcactttgactttttccatcctacaagatctaaataattcttgtcataaaataggcaaatggtctgaggtgcctgacatccaggcattcttttacacatcagtcccttcccagtctctgtgcccagtgcaactcgtcccaaatcttccctctttccctcccgcctgtcccctcagtcccaacaccaagcgtcgctgagtctttctaatcttccttttctacagacccatctgacctctcccttcctccccaggctgctcctcgccaggccgagctaggtcccaattcttcctcagcctctgctcctccaccctataatctttttatcacctcctctcctcacacctggtccagcttacagtttcgttccgtgagtagccttccccctcctgcccggcaatttactcttaaaaaggtggctggagctaaaggcatagtcaaggttaatgctcctttttctttatcccaaatcagatagcgtttaggctctttttcatcaaatataataatccagctcagttcatgacttgtttggcagcaaccctgagacactttacagccctagaccctaaaagctcaaaaggccgtcttattctcaaaataatgtcaatctgctcctgacattaaataaaactccaaaaattaaattccggccctcaaaccccacaacaggatttaattaacctcaccttcaaggtgtacaataatagaaaaaagttgcaattccttgcctccactgtgagacaaaccccagccacatctccagcacacaagaacttccaaatgcctgaaactcagcggccaggcgttcctccagaacctcctcccccaggagcttgccacaagtgccagaaatctgaccaccaggccaaggaatgcctgcagcccaggattcctcctaagccgtgtcccatctgtgtgggaccccactgaaaatcggactgttcaactcacctggcagccactcccagaggccctggaactctggcccaaggctctctgactgactccttcccagatcttctcggcttcgcagctgaagactgacactgcccgatggcctcggaagccccctagaccatcacagacgcagagcttcgggtaactctcacagtggaaggcaagcctgtccccttcttaatcaatacggaggctacccactccacattaccttcttttcaagggcctgtttcccttgcctccataactgttgtgggtattgacggccaggcctctaaacctcttaaaactccccaactctggtgccaacttagaaaatactcttttaagcactcctttttagttatccccacctgcccagttcccttattaggctgagacactttaactaaattatctgcttccctgactatccctggactacagctatatctcattgccacccttcttcccaatccaaagcctcctttgcgtcctcctcttgtatccccccaccttaacccacaagtataagatacctctactccctccttggcgaccgatcatgcaccccttaccatctcattaaaacctaatcacccttaccccactcaacgccaatatcccatccggcagcacgctttaaaaagattaaagcctgttatcactcgcctgctatagcatggccttttaaagcctataaactctccttacaattcccccattttacctgtcctaaaaccagacaagccttacaagttagttcaggatctgtgccttatcaaccaaattgttttgcctatccaccctgtgatgccaaacccatatactctcctatcctcaatacctgtctctacaacccattattctgtcctagatctcaaacatgctttctttactattcctttgcacccttaatcccagcctctcttcactttcacttggactgaccctgacacccatcaagctcagcaaattacctaggctgtactgctgcaaagcttcacagacagcccccattacttcaatcaagcccaaatttcttcctcatctgttacctatctcggcataattctcataaaaacacacgtgctctccctgccaatcgtgtccgactgatctctcaaacccaagcaccttctacaaaacaacaactcctttccttcctaggcatggctagcatggtcagaattcttacacaagagccaggaccacaccctgtagcctttctgtccaaacaacttgaccttactgttttagcctagccctcatgtctgcgtgcagcggctgccgctgctttaatacttttagaggccctcaaaatcacaagctatgctcaactcactctctacagttctcataacttccaaaatctattttcttccccatacctgacgcatatactttctgctccccggctccttcagctgtactcactctttgttgagtctcccacaattaccgttgttcccggcccagacttcaatccggcctcccacattattcctgataccacacctgacccccatgactatctctctgatccacctgacattcaccccatttccccaaatttccttctttcctgttcctcaccctgatcacgcttgatttattgacggcagttccaccaggcctaatcgccacacaccagcaaaggcaggttatactatagtacaagccactagcccgcctcttagaacctctcatttcctttccatcgtggaaatctatcctcgaggaaataacttctcagtgttccatctgctattctactactcctcagggattattcaggccccctcccttccctacacatcaagctccaggatttgccccacccaggactggcaaattagctttactcaacatggcctgagtcagataactaaaatacctcttagtctaggtagattctttcactggataggtagaggcctttcctacagggtctgagaaggccactgaggtcatttcttccgttctgtcagacataattcctcagtttagccttcccacctctatacagtctgataacagacgagcctttattagtcaaatcagccaagcagtttttcaggctcttagtattcagtgaaacctttatatcccttacggtcctccgtcttcaagaaaagtagaatggactaaaggtcttttaaaaacacacctcaccaagctcagccaccaacttaaaaaggactagacaatacttttaccactttcccttctcagaattcaggcctgtcctcggaatgctacagggtacagcccatttaagctcctgtatagatgctcctttttattaggccccggtctcattccagacaccagaccaacttagactgtgccccaaaaatcttgtcatccctactatcttctgtctagtcatactcctattcaccgttctcaactactcataccctgctcttgtttacactgccagtttacactgtttttccaagccatcacagctgatatctcctggtgctatccccaaactgccactgttaactcttgaagtaaataaataatctttgctggcaggactatgctgtatctccttaggcactctctaatcagatatcctgagtcgtcccaattcttagaccttttatacctgtttttctccttctgttattccatttagtttctcaattcatccaaaaccgtatctaggccatcaccaatcattctatacaacaaatgtttcttctaacatccccacaatatcaccccttaccacaagacctcccttcagcttaatctctcccactctaggttcccacgctgcccctaatcctgcttgaagtagccctgagaaacatcacccattctctctccaaaccaccccccaaaaatttttgccgccccaacacttcaatactattttgttttatttttcttattaatagaagaaggcaggaatgtcaggcctctgagcccaagcccagccatcacatcccctgtgacttgcacatatacgcccagatggcctgaagtaactgaagaatcacaaaagaagtgaatatgccctgccccaccttaactgatgacattccaccacaaaagaagtgtaaatggccggtccttgccttaagtgatgacattaccttgtgaaagtccttttcctggctcatcctggctcaaaaagcacccccactgagcacattgcgagccccactcctgcccgccagagaacaacccccctttgactgtaattttcccttacctacccaaatcctataaatggccccacccctatctccctttgctgactctcttttcggactcagcccacctgcacccaggtgattaaaagctttattgctcacacaaagcctgtttggtggtctcttcacagggacgcacatgaaaataataataatcaatgataagatcttcttgtatgtaataggtgagataattcctgtgatgcactcaatacagtatctgttacatacgaaatgtctagtaaacattagctactaggattctttgttagggttgagtgcagtggctcatgcttgtaatcccagcactttgggaagctgatgtggggggatcacttgaggctaacagttcgagaccagcctggccaacatggcaaaaccccgtttctattaaaaatacagaaattagctggtgtggtcgtgtgcgcctgtaatcccagatgctcaggaggctgaggcataagaatcacttgaacccaggaagcagaggttgcagtgagctgagatcacactactgcactccagcctgggtgacagagtgagaccctgtcacagaaaaaagaaaagaaaagaaaagaaagaaaacattatggttaactttcattgcttatcttgagtattgcccctctactcagtgcctttccagaaaggtacaagtaaatgtgagaaaatgggaaaaaaaaaaatggtcaagtagaatggatgtgtatgtggctgtcagctcactgtaacctctctggtctatctttgatccttagacacagacttggtgaatggaacacagttgattgaatcagagatgaacactgacctaaacagaaacaatcaggttcttcctcttgggaattttaaattgggactagaaaagtcttgcatatttctggaactattatatgtaaacctgaaaagaatgggatggtcatatgccaccttgtgaactgggagtcaaaggtagacagtctgcataaagatacagaggaaggcaggaacaagaggaagttcactgcctcaatcccttcttcccaagacctagccataatcctttccttgggttccacttccatttcctccttgtggcttaagctggctcaaggagtcccacctattgcagtggtgtctgtagccttataaccgtgctactcagcttacatcaagcaagaatccaaatttcaaaatctttgagttacaggcttgtttctttaggaaagaagacaatgaagctgcatacccaagcacttagaggaacacttaagccaatctgtgtctgggttgaggctgtatgataaaactatttcaggtgatttgggctttaaggacacaaaattatataaaatactgccacctaagatttcaggggttccggccaggtatggtggcccctgtctgtaatctcagcactttctgaggccaaggcaggtggatcgcttgagcccagagttcaagaccagcctgggcaacatggcaaaaccccacctctacaaaatatacacaaaatgagccacacatggtggcatgtgtctgtagtgccagctactcaggaagctaaggtgggaggatcacttgggcccaggagattgaggctgcagtgagccaagagtgtgccacttcactctggagtaggtgagagagtgagaccttgtcaaaacaaaaaaaaaaacaaacaaaacaaaaaaacagaaaacaaaaaaacagatttcaggggttccaatttgactgcgagccaccaagacatatccatcacttagacccagtcatgcccaatacaggcaagatagcaagggttgcacaggggagtaaagagccacctgggagaaaactcagcctaagggaagagggtactaggcagatagtcttggtgcaaaaataaagccttagtcatcaaagggaaggagcaaaccctagctcagtattatatctctcagcccagttccccacggcatctcctctgaatcctgtggagcaatgcaaaggtatgtatggaggcagagggatgttgtgacaaaaaccaaccaagctaagctccctaagacatggcactaccagcagtttggtagccatgtgaaacacagaccatgagaaagaaacattcattctacccaccagtgcatgcaaccccaaatgaccttaaacacctcttggcggcggtgtccagtgggagatggtggtacccagcaaaaatagttcacagggagctttgacagaacaaggtagaagccatgtagaaacccagaggacacagtgtctgatacacatgcagtaacccctgtgggctcttggaaataattgggaaagggaagactttaaaaaaaataccagaagtactgcaagatcaattaagggtagtgggaggtgggagcagttaagcacaggtgagaaatggcaataactcatgagacataaatatacacttgggtaaccacaaagattgggaccagacgacctgaaagaatttaatgaggctgaaaattcaggccagtgatgtgaagtacagatggctgctgaattgccgaactgagagtcatcgaacctcttttcccttaatgcaaatggtgacctcagtgatacacaaagaagtttctcctaccctatttgaataccactgtacacattctcattagagactcagggagcagagaggatgccagccagcatcagagaaaaacaagactcctcttgaattttcttggtatcaagaatgatgactggtataacattaactctttgatatctgacagggcatcaggtgccctggatatgcagaagcgtgagggcatcctgttaatcaaagggaagcagattctgggggaggccactgtagcaaagtgggattttgtggtcacatgacttggagtcaaagagaccaaacctcaaattttggttgtaccatttaccaacactttaagcagcttaattcacttctctggtctccaatttatctttctgcaaaactggatgttttgcgtgatatgtaaaggaaatagttacctgaagcgccttttacttttcctgttattaactgtgttaggttgtaagtcttgtaactctattgttattttccttcccgttccttctttcaaaactcaaatgcccagggaacaagacaggtaacctaagggagcatggggtcaggtggggactggggcacacaggactgcacctgccccacctgaagaggcttccctagatccagcctactcttgcccatagaaatgctagcccaggattatcaggtgtgatttttcaagggaagccagaaatctggagtttcatgtgaagtctcccattttaaatgttgcacctgattcaaatttttaacaaacacattaaaaggcaaatccataacaggcttcaatcagtccatgacagctggcttgcatcttctggctccattttgaggaaggagataaccatgagatccctgcctcaacctctcatcagaaaccagctcaaactttccaaggcattgctgcctccccgcaagaagactcccagagaaggtcatattgaaggagaaaggaagacatgactcagggatggtttctatggctctctaacagggctccttattatccacattggaccaagggctctaaggttccacctgcagctcccagaagtcccaggggatgacacctcctcagctcccatcttcccacactaggactcagatgctatgaggctgacatcccctcatgcatgagatttcatgttctaggatgtgttctaacctcctgattctcctttgggtggccccactgctccaggaagaactgggcaatagagataccctttctgcaaagccaagggattgtatttacaaagcttgtaggaggattgattgattttgacatcatctctcaggctgctgaagctcaaatgaaaaacaaattatcttgagaatcaggtaaaggaggaaatgtcactgagagggacagccacaaacaaatgcagatggaggtccctcgagagaaacactggcggtagaggaagtcaacacattacaagaaggtcatggcctcggtggattaaaaggctatcaaattcacaaagaacatgatgatagttaaactctagtccagcagagagggagtgctcttccaagggttttttcttcaaaaatcagacaattttaaaatcttctatggctagcattgcaagcagagtgaaaggagaaaactcacatgtgttaaacacctactgtattctatgtgtgatgatttatatatattctttagcgagacatggcacaagttacttaatcacactgaaactcaatttgcagctataaaataagaatctatggtacttaccttgtaggctaattttagaaaataagaccaagtatgggaaaacccttggtactgtgcctgcaaatattaagtattcagtagaccattgctgtcattatcttcttatcttaataattcctcacaacagcccaggaatattatgtgtatttcatgatgaaaagttaaatgcagagaactcgcttgtccaaattgtttgcccaaattcatccagctgttaactcaagtagactggattcaaatctggatttgctcttgtttttcttttttatatatatttttgacaatttttttttctggtttagtgatactagcaagcctgcattctaaaatattctaaccagagttatttttcttttcaagcaaaattaaatgaggcaatgtttaatatctgactaaaccctcccaacactcatggttcatcatcaatgccttcttctcctccatccccaacagtttcacccacctgatgtccagggccagaccctgtactgccagtgtcccctctgccatggatcttggttttggggtgtccattccaggccagctcactgtcatttaatgcagggtaacttcttggctgggtgtgcatctctgctgagttcctacttctcactctcttgctactgtcactccattcctcaactgtgtcccctattgcccattttgttggctcctccatcctgacatctgatttggcatctctgtcttgaccttccaacatggcatcaaattagttcttctgtcccttcccactcctaggacctaccagtctgccctgctcatacttgatctggatgagactgataccctgcgagacgcaacagaatcagctcctgggattgtgttagcagaatgacgggagtgtgagatccaccacatggcgaggcaccccaggaacctgttttcttcttgaagagcaaccgagaactatttccaagttatccttcactttgaggtctaaaccatacatttgtcaattttaatactagagtctagcatttatttaataatagcctactttgtgaaagaaaggcagataaaatgaaaaacaaatctcagtatttagactgacaacctgatttcagaaatactaagcagtggttttgtgtgtgcgtgtgtgtgtgtgtgtgtgtgtgtgtgtgtgtgtgttttaagggagcagtgttggcaatgtatgtgttaggataaagaaagtgtattgttactacagtttgatgaaatttacgttttactcagggtcaatcttaaagcaaaggtttatttatgagtgaatgaaagcaaagtctctgtctattactcattaacagaatggcaggttaggtcctgcaagaattgcagaggacgcagacctgagtaagccacagtgacgccttcctggactcactgtccataggagaagataaacttgcatatggaaagtgtcatcataatgtgttaagaaggggcctgagcccttaaccctgcctgaagtctcagggatgctttcttcaaggcactaccacttgaagtagctattgaaggataataaatatgatgacatttactgaagacttattaagtggtaggcactgccataagtgctttccaccattaccatttgatcctaacaactgtttaatgagatgagaattatcactatgcctatttccagatgaggaaactgaggcacagagagcttaagtaacatgcccaaagtcactcagctaggaagtagcagaggcaggacacaaacataggaagtctgaggatttgaaattgatcagaaagggaaaggagtgaatacaacatgagcaaagacacaaaagagtaaagcaacactggtgtgaggggaactgtgagagttacacagtagacactgtggccatgcccgcatcccttagctgtgttccagaaaactctttttgcactcttgacctgaaggcttttccttaaaccaaggcaggctgttcagcctttgcatggcaggctagatgtgctggtaattagcacattagcacattacggtgtgctgatgggatttcatgtataaacacccgagcacccttgatctaaaggcagataactctgaagcatgggttttaacgctgtttctcagcattgccctttgggattaagcccggtgacagctggcttgataacataccttatatcagccacctcccttcctgatctttcctgcactttccaaatataaacctcttaaacttgaacccttgtccctgggtcagcttttggaggaacacaagctaacacaaatgtattataccgttccaaaaatataaagtaggaaactgaagaggcatagcaaagtcaatatagcccaaagtctgtcatcaatccacagacagatacttgttacctgcccaggacagtgtatgtttaggaatgcagagtatgtataacaatatgtatgatatcacttcaggaagtctttaggagattatctgtgtcccatctccattttacatgatctacctgagacctcgaggtggacatggtttgtccagggtctcttagctagttagttgtaaagcccagattattgtttcctatacactaataatgagagtcctattcaccaaggctaattagagagacttttagaataatctttgcaccaactccaccaactttatcaaatgcatgaagactacgatcttgagaaatgcattttcaggctctttctctaaaaccagcatatgctaaccaacccaccagagttggccggggctcgcagtgcagagaaacagataactatgctcctgtttgcaaataaacttctgtattgattcactagccacttggtcaacctagtcagttcacttctagaaagtgatgatagaaaaagaacacagagacgtacaagtacgtgcacaatacagcactgtgtgaaagagcaaaacaatagaaaccacctgagtacccatcagtggagcagtacccaatgtcacaaataaaataaggacactctaggaagtgtccttattatttcacatagtatagtgtccacactatactatgtgaaaaaaaaagcaagctgtaactgcatatatatagtacaatcccctttttgcttaaaaaagaaaagcttatgtgtagagagatttttgctttataagcacaagaacattctggaaagagacttagaaaacggtcaacagtttgtagtggtataatttttggaatattaacttgtgtttgtcctcccagtgtttcttcccctcctcccttgtaagcagatggtcagggctttttgtggcctcctgccacaagggagatgtttgtcatagggccagaagccaaagttgtctgcaagacacttccgattctggtactgaattttgtaaaacctaaacccattgaggagattatgcttggtgtcctggaggaactggagagagaagggaaggtgtttggagtgtgaatggaatcctagtctgaattctggagcactctgatgaggaggaagaccctagggaggctgggctagggagctgggaattccaaagcctcaccaaagattctcctgatttgaaaagcggcagcagagaagccagaaccggaagacaccttgtagtctgagaccatggacacctcagcagttaatattgtagagtaagttcaatggctgaagagatcttattagggtttggtgctacacaaaaccctgagacccttgtccatccctgagggtgacaataatatctgagaccaaattcctaattacctaatatgataaagagagttgctataggcttagaattaattttatgtaaaaagtaaagtggtattttttttttgcatgtctgagtttgtggaataagattcatatttactacaagtaatggaattggagattcagaggggagaaagtcacttatcacattagtgtaattttctgatggtaggattatggagagttttaggttttccctttttttccccaacttctctcccctcagtattttaaaaataacattgtgtgggttgtttttttttgtttttgattgttttttgtttttcaaacaggtctcactcctatccatgtaggctagagtgcagtagtgcaatcttggctcactgcagcctcgacttcctgagctcaggtgatcttcccacctcagtctcctgagtagctgggactccaggtgtgtgccaccatgcctggctaaatttttgtatttttattagatacagggtctcaccatgttgcccagactggtcttgaactcctgggcctgcccacctcagcctcccaaagtgctagaattacaggcatgtgccaccatatccagcctaataacattgtttttaatgttcattaagtcatcccaccctctcagtcttgcagaagcctctcaagagggacagaatcagttgcaaagtaccatttctgaccctgagacatggatattatttgttcatttaaatgtcacctgaaaaacccactcactcaaatggtctgtgaagcttgcaaaaacaggaatgcttaccctcctgggtcctgaatttttggttctcttggactctttgaaattcttctttctcagaaaggagccctctttctatttcccctcaaagttgtgacttgaccctcacatccctttcttctccagggccccttgataagattcttttaaaatttctttggagggcatcccttttaggaagagcaaatgccttttaggatagatatgaaagacagaggatatggtgatagctggggacagctgcacagtctgaagtggactctgttgtagagtactacagaaaagatgactcagtgtttaaaaaatgcaataattctaagccccctgcgtggaaaaaaaagaagaggctcttttctacacatcagttcttgggtcctaccaatccatccagtcttagtactcactgctctctaacacagtctccagactcagactctcaggctctctccctccattctccccctcaaaagcacagacccccatctcctggtctttgtacaagctgcttccccttcctgatggaccacctgcattgcacttctcatagcctagtcctatttatctctccatgattctacttcctcctggctatagtcactttctctgaatccagatgttacatatacacatgtgtactagtcgagagggagaggagagagagaggagattttagggaattggcttattcagttgtgggggccagccagtccaaaatctgtagggcaagctggtggtctgaaaattcagatgagttgatgtttcagtcagtgttgagtccacaatctgcaggtcaggccaggctggaaattctagtagggtttctatgctgcagttttgaggccaatttcttttttcttcaggaaaccttagtctttgctcctaaggccttcaattgattggagtagacccacccataatatattaagtaatcggctgtactcaaaatttactgacttaaatcagtaacagagaacagaatgacctcataagcttaggcagagatacattgattgaaagtctttatatctgcacagttcctgtgactgtgaacttaaccatccagggacagaaaatgtggatttctcattcttgctgctacagcctctaggattcttgatgtagaaatggcgttttcattggggatgagttcaacaaggggacaggaagcaactctctgctaagccccgagtcatcaactgtcataaagtgcccataggagcagactgttaaaagttgtgatcgaaatgaaattcatgatttttctctggatttctttaagccatgctaaacataacggcttaaatggttggtcaaatagttgatgaaatgctaattgggtcatcctctctcctctctgaacccctgccttgagaaacagacagcagacagacaccacactcacacacgtgcacacacacacacacacacacacacacacgcacacacacacactctgatatgaatgaatctttgccccaattaactgaaggctgaccaattaacttaaactcaagtctgacatattaatcttagaatatatcttcatgaaagctcctgaggatctgagtcagagaaaagaaggatgccaaaaggggaagcaaaagggacaaacgtgtctgtctcacagctttgcctctgccagcctctagagttaaccacaataaatagcacttaaaaaagggtccccactgcagttgacagtgaccataagacatagccctgcttatagatagaatatatctggtatggtagggttgaaacatctcttggctgttgtttttttccctgaaacctgtcatctccgagagggatggtatatgtaatattttaatatttaatataaaacacacacaagtagtatttcatctgcctgtatcatgttcctagaagtatatttagaattttaagctgttccaactattatacattttgccaaattttagtcattgagggagttgtgtttaaacatctgttgactgcagatgttaagcagtgtgaaacattcttttaagatgccaaaatgcaattaaaatcataatatttttcctagtaacaaatcatgctaatcagtgaaaatttagaaagataaaactcaatgaacaatgaatggtaataattctctaaataatcagctgtggctcatggcaggggagaactaacttttaactaaattatgttaaatcaatgccaattttctcagctcctgaaaagtgttctctttttttcttcaagccaggcaatggtcaggtggagtaaaacataaggaagaacatctttttggttcaaagcatgaaaaaaattgggtaacacaccttccttacatctagctgggccattgaaccagaatatgccaatgtttaaaacactgaaatgccagcttttctcttaaaggacagcatggaggtgtctgatttctgcttgggctgaggattcaggagaagatgtgtggaacacagcctggacatgccccaacctggttgatgaattccaccccaagtagtggaagaaacacacctacaacatgagcagagaagatttttcttctgtactttccaggacttgaagctgctttgttttttggtcgctgggtggggaaggaggaacaatagtatagcttccagaagagagaagagagatatctcttgagtgtgaattaagcagtaccaagaggcctcaagctagctctctctcctgctttaaattctactgttaagagtttttctttaagtttaaaaccttgaaagctccatgatgctcctgagtagaacaataaagccattagtagtcaatggccgtctttaatatttttcttccatttcaattttagttctaattttatctgactcctaaaaatatgtttcatattctcatgagggctgggcccatatgtgtaaatggttgaaacatcttactttgttgactgaactagtctaaatagtcagtcaaattttttttttaggcaaaagtgaatttcatcaaattggttggcccacaatttcttaaattcatcattgattgattatctgtgatgtgccaatccctgtgcaagttcctagggcaacagaagtaaaaatccataatctctgtttccaggactctatcagtttgatagggacacaggcacataagcagacaatcataatgcagtggtagtagggatatgccactctcatccaggcagtgtattgatgaccatgtccttgagttcccaagtacattgaaaaaggtgtaataaggagatgctaaattagcaggtagtacttatatgaagttctactgtgtctactcctgtgccaggtgtttcggttgggaatgagtattgggtaagaggagaatagaagatggaaaggcagaaaacaccaactcagctgatatggttgggatgtttgtctcctctaaacctcacattgaaatgtaatccccagtgttagaggtggggcctagtgaaaggtattggatgaggggagtggatccttcatgaatggcttagtgtcatccccttggtgatgagtgagttctcgttctgttagtttacacaagatctggttacttaaaagggtgtggaacctccccctcctctctcttactccctctcaccatgtgacatgttggctccccttccccctcatcatgactgtaagcttcctgaagccctttccagaagcagaaaccggcaccatgcttcatgtacagtctgcagaaccgtgagccaattaaacctctttccttcataaagcacacagcttcagatatctctttgtaacaaagcaaaaactgactaacacatcacccattaaagagtttacaatttatttagaggaaataagatggaagtgtagggagttattagaaagcaagacaacctacaaatctgtaaagtataagcatcaaactttgtgaacaaagagtatgatgtaggtattgagaaaagaaaaagtgggatatagggtggaacagtctcagaaaagtcctcccaaaggacacaggtaagagaaagacatggaagaactggtccaacttacattggtagaatcagagggcttaggtcttttttttttttttttctttttttttttgagacagtttcactcttgctgcccaggctggagtgcaatggcacaatcttggctcactgcaacctctgcctcccgggttcaagtgattctcctgcctcgcctcccaagtagctgggattacaggcgcccgcaactacgcctggctaattttcgtatttttagtagagatggggtttcaccacgttggccagggtgctcttgaactcctgacatcaggtgatctgccctccttggcctcccaaagtgctgggactacaggcatgagccactgtgcctggctgggcctaggtcttctaagcagtggaaatggcagaggcaagtgtccagagctgggaataaggggatgttatgtgggtatcatagggatgggggcaggggacttcacaataagacaccagccagtctaaagttgagtttgtgtaggattttttactcatatattattgagggccatgcattgaactacatattatggataaataattaatacattcctgccatcttgaagtttataatctagtcctacaaagaaacttatcagagaggtttctctgaggcttagtgtgttgcggtctatgccttttcatttcatccttcaaatactgtctactcaatgaaatttacctggcctgttcagccaaaataatttataaaggcaataatagctaacattattaacactctcctagaccagtgtactgtactaactactttgcatgccttattcataataagttaaggtctcttatatttttcagtgtactatgcaccatgttatggtctttacaaagattacatagtgtaatctttacactaaactttgcaagggtgtactactattatccccattgtctctatgagaaagctgaggctctgcaaggttaaatgatttccccaaggttctcttaaacttcgtaggggaagatggaggatgcttagagagtggtatgaacaacattgtgtgcctcctgatgtgatacaatgtgcagcacatagcaccgcttttgaagtactgcatgcttgccaaaagaaaaattgaacataaactttcaagtttattgaaaatggagggtccaggagtagtgactcatgtctataatcccagaactttgggaggccaagccaggctgatcacttgggccaggagttcaagagcagcctagccaacatggtgaaaccctgtctctactaaaaatataaaaattagctgggcatggtggctcatgcctgtaatcccagctacttgggaggctgagacatgagaatcacttgagcctgggaggtggaggctgcagtgagctgagatcacgccattgcactccagcctgggcaacagagcaagactctatctcagaaaagaaaaaaaaatgagaaaagaaaatggagggataaaggattaagataaatgatgccacaaagaagtaaacagaaaaatttagaattttggagtgcagggactgcaggacaactgaccaaatttcttcaacatgtcaaatatatgtgtgtttgtgtgtgtttattctataaatataataaaaatatttttatataaaagtatattatatataaaagaaaatttggattggattaatgtaatgtttacagttatggtaatggctatgttaatgtaatgtaatgttaggccttgtttagttcctgatttgaacgaactaatttttaaaaaggcatttttttaataagtaggaaaatttgaatatggactggttattggagggtacagggaaatattctcaattttcttgggtgtgatcatggcactgtagttatgggagaaaatgctaatattttttagagatatgcacaaatgtgttgggaagtcacatcaaatgtgggatttgcttaaaaatatttagcaacaataactacaacagaaaagaataagtgatgcaaacatgatgaatgcttgctaattgttaaagctgggtgatgactacataaaggatcattgtattagtctctcaatcttcctgtgtttgaaattgttttaaataaagattcatttaaaatgcatggcttaaaatagccaatgaggctgaaaacagattctcttgtaccactgagcccagttctatgcacacagtaggtgcttaataggtgtattatgaattactagaattggagcatggaaaacagctacaggatgaatgaaaatcaccctgttctcctaaacatacaatcacagcagtgtgggctccagacagaaaacctctcttctttttaagtatgtttatgctgcatgttgcttttttttttttttttttttttggtggaatcttctcatctctttggcttcaagccttcctttactgttaatcttcatcaaaattcacatagataaaattttaaatgtgaggtagaagggcctttgcagtgtggttcacctagtaagtataaattgctttactacagagagctttgaatacaggctgacattggccttgtctccgaaaatagcaaactgcagccacaacttaaacacagacatgatgaaatcaatgttttaaggagatcagtttccagcttctctgctcaacatacctccaaagctgcctttcacaaaagcatttctcttgtatcaggatatagaaccactcccaaaccgtgattgcagaggaatgagggctcccacaggccgaaagacactaccagaactaatctattgctttgaacatgaccaggctgtttttccatataaaatccatgagggatataaaaaatgacgtcagcaaacattcttccggaaactgatttattagaccaaatatgaaattactggtgcttttccaaggggaaagaagattgaaagctcctgcatatagcctgtttatattaagatatttgtgtctcaattccagaagctggcaattgaactcccagaaataaactggcaccaattcccatgaatgaaatgactatgaatcatttcatttttgaaaattaaacaaagatgtgacttaacaggtgatgagttgggtggatgtgcaatatttccacaaacactcagccataatacgtgctcatattattggtatgattcggaaccctttaaacatttctatatctgagtcttatgagagagaagaaacccagcctgtctgtttaaacaagcttagcaaattattttggcagaagtctgtctttcagtgtttccgatgaggtgatgtgtagttttagggcatggaatgtctcacatagtcaggacatcctattagaaacaagtgtctgcttgtgaattgtcccctcacctgaatgagaaatgaggagagaaccagaattaacaatcaatcttttttttttcttgtagcgatggaatctcactatgttgtccaggctggtctcaaactcttggcctcaagcaattcttccacctcagcctcccaatgtgctggaattacaagcatgagccactgcgcttggctaacagtcccttcttgactctcttcttttacaaatccagaagcccatttatccatcactttgagcatataaagctgtgctgtgatatacactaatcattagctacatgcgactatgtaaccttaagttaattaaattaaatttaaaattcaggttctcagtgcactaatcacatttcaagtgttcaataatcacatgtcgctagtgctaccatattgaacagccaagatttagaacattttcattgctccaaagagaagtgggctattgacataatccctatttcttcattttttgaagtcagaagagaagtatttgtcctatatttctcacagaaagatatcataggatcagtaagaatacacctggaattagtttctctaaaactcattctgaaactctgtagcctcagtttaaatagtataaaattttgactcaataaatcttgaaatattcagtaagaatggccaaacagaaaaaattctggagtctacttgaatagctaattggatttttgatatttggtataaaatagcatttaattagatctcatttgaaatgaacagagtgcattatatgcatgtatatatttggaatactgattggaaaaggccaggcatgatgaagacatgttcgtgtaatacttatcttttatcctgtgtcttgtccttaaggaaaagaagacatcaaacaggacacaaagtagcaaatgggagtttcttcttaaatgttatgtgaatgactcacttgttaggcaagtgagatgatcaaggacgggaggagaagacagcagaagagctggaagtaaagtcacctccaaagctctagagttggtagttcacgtctatttccaggaagacttctaaatctaatgaaatgatttgaatgcaatgctttatccaaaaataaaagcaatgttagattatgcagcacctgttagccagtgaagattaatgaaaaaaagcactgctgtggagaaaaagtatccaccattatttattcaaaaaaagaatggagcatccaccagtactaattatcgtgttaggtgtttagagtatgttaagagtaataagcattcaagagataatagaatggataattaattacaactgaaataaatattacaaaggaaaagtaaagggtcccataaaagcacataacaggaggaccaaagcttttgagagtcagaggtctttctaaagaaatgacattcaaggagacacctaaaagaggagtagagtttattcaggtgaagaagtggagaaagagcattttgggtggaggatatgtgtatggaatttctaaaacaggaaacagcattaggcatttgttgtgtggtaaggcatagcaagcaagaaaaaggagaatgtgacacaagactgggaggtaggtggacatctgctcatgcagaaccttatagaccacgatcagtgtataaactaatgaatgaaacatgccttcatataaatattgctagtttgtgtttttatgaacagttataattcacagaaaaagacataagtatgcagaaatatatggtatagaatgttacttagttatccaaatctatgaaaagaaagatttccagatggaaagagacagtgttttcaaagttgtggaggtaagaaagaatatggtgttttctagaaatagtaaggggaaggacaagagaaaaagttaaattgtagatgaggccagattgtcaaaattttcaaatgacaggatagggtgaatgaacatcacctgttatgcagccaggactcagacaactttcagtaaagaaggggcaaagtgagagctgttttaggataatagatcaagtggtggtgaatggttggggagggaaaaatttaaatggatatgagagtttgggtttgatgttgtggccaaaagcaagttatgttagattcttaaagtggtcataaaaccttaatgaggaaaataattcagtaggtaggtggaataaaactgtcacaaaaatgaagtaaggaagagttaagagtggcagttgggagggtgggggtactggggggtggatataaaagccagtgagaatgagtggcttcccagccttcattttcctcttcccctactaacagcagccaaatttccctttggagacctacccacccaactcagcttcatggtaattagtattgagtaatgaatttggtatttagtagttagatatttagaaattggttcaggaatttacaggtgaccctatttgggcaaataagaaacagacatttgctgaggtttctctaggaaagaagtttcttcatggtttcccaggacctatcaggggcgatggtctttctccagctgaagagaggaaggtaaggatgtggagactgtaatagctgcagctttttatacaaggatgaggaagcagaatgcgaatgagcctatcaaagcggggagagtagagggaaaggaatcacagagaagttgtttcaataccctgatgacactgagaatctctgactcaacctctgtgctccagttataactcaatacatttccctttttcatacaggtcagtttgtgctgtagcttgatgccactacaatattaatgacacagggagaacagattaaaatgagttaatctttaaaaatagaaaaccgatgagaaattattgccaggcaggattaactttgtcccaaatatttgataatatgagaattggcttaataatcaaaagtagaaggaagaaataaaatgaaaaagattatcatctataaatgatacagcagcacatggtattaaaaccaaagatctcacgtctggccatgtgctgctgctttttttttcccccagagttgttgcttgcaataaagaaccatgactgaaaaacgctccctgaaaagtgaaatccaaaaatttaaagaagaatattttaaaccactgggaattgctattaacatttaggaatctatctttccagccatttttgtacatatgcaaatttatttttaaaagaatgggatcctgatgcctaccctgtattacaatctgagttttttacatagcaatttataatagacacatttccatgtcaatcaatgaagatttatattatcttcttaccagcagtttcacatttatgtctttataaagaatatcggcagagtggtaaagggaaggggttttaaaagccaaagcgcatgctcagatactggctctgcctcttgtctctcaaatactctgtggttcctcatttctgttttgcagcttaaatgaaaagttacctgtacagtcctgagcacaatgcctggcacagggaataagggttactatcatcattttttaaattactaatataaggtatgctgcaggggaccaaagtgaggagatataaaagatatgtatgaggtatggagatggaatagaattgggccctatctacacaatacacagtacatgacagaaaaaaaaatcagtaagagaagcaacaagaaataaccagaaatgaccatattttttcatataaaaattacgttactgatttgggggtcaaataatttttagagcataactgatataaaatttgagtgatgagattatttaaacaaatgaacctgtatgcccccctatttgatttcttcccactttctacaaattaaaatgaacagaaacatgagtggagtttatggtctttatgaagaagtgattttctctgtgtccttaggcaaaatgccttcaattgacacaggctccatctgtactccaggcaaaactgcacgttcttccttttttaaatgtgtgtttttaaaataccatttggcacctaccctacaaagcttaaaaattagattttgaaaaaaaaaatcacccaaaatgttgcctctcatatagaggcaagcaaattggattcatgtaaatgatccttaagaaatgtctttaagtctgtattccaacaatcgcattttttaaaatacacattgatttgcttttaaaatttagcctcctcatttttttctcctgtattagaaaagaatctgcattatgcaagtatatcttgcattgagaaacttagtaaataaaaactcttatttgcatcatagaaaaattagggagtcattatttaccctttaagatgattttcaaaaataattcaaagtaaaatccctttaaagagaacacttgccaggggaactaaaaatatgattttaatgtaatacaacttttctgaaactcatctactatgtatagtaacaaaacaatgaacatgaaaaagttgattatatatcctccattatattcccaacagtatatgtatttctgtaaatattttgagctaaaagagatggaagtatctctagcatggacagccctggtgattcaagaagctgaccacatccagtgcagactggtaagacagtaataataggggttggccttgctttggaagattttatactttgtattagtgttcttttccctatcacatattgagtatttacattctaaaacttccattctgtgaattattcaataaatagtgttgttttgtgtttactggatgactttgaaaaaataaagcaggattccctaccataccctttactatatcaaaattaagtctgtatggatcaaagatgtgagtgtaaaaaacattagtctccaaaggcactgatgaaataaacaaaccaacccccaaaacaaaaaataaataaataaacaaaaaagataccatagacttctatttcagcaacgtgaaaacgtgaaagactaggtttttgcagacttcctcatggttcagaacatctacaaatttgaattaaattaaaaaaaaattaatgcatgaatgagctttcaggagattaaagggaattcccaaagcccttgaggccagaatcaacaataaggagaaataatctagtactaaaattccttactcctggtagcaaaaagccttggttttattggggcagacatgagatgtgagggaataaagcagaatgagaaggtaaagcagagattctagaataaagtttcccacaacccaaaggttgacatcctccttagatgattaatgaacttgcaatgagaagaaagtcatggcctgtctcagacttgagacagttggagctggaaaggagggagtatgggaggaaggatctctcctctcaccaaatccctaagcacaggctcccatttacacaagttgggaggataaaattaacatgacttgtacaacctgccctttccacttcccaaaaaagcctctagtcaagatttagatggaaatgataaaatgtagttattggactaaataaaattatatttaaataatgaccaaccatataagggaaaatgaaattgtattttcctaccttatactatatgcaaaatatcaattcttgatggtttgatgacctctgagagagacaaagttttcaaaactttaataaaaaataaagaagtatatatttttaaccttgatctagaagagaatttcttaaacaaggtataaaatgtgcaaaccaaaaagggaaaggttgatagatttgaaaattaaaattaagagctgttcataaaaagcaaaatatacaacgtggaaaatggcaatctctacatggagactctgatgagcttagaagggagccttccaacgactactatagagccctttcttcagttcaatatgggtctcttaacctgtattcttcagatagagacattcatttggttataatgccactatgctcaggccatcttatctaaaatatcatcgctagagttgctataaacacagcataaattaaatttctgtgcagcattatattgatctagtttgacaatatcctttaggaaattcttttacttgttcactcaattgcttattcattcattcattcattcatactaattagtaaacattcattaggcatttactctatgcctagcactgcactaactcctgaacatcctcaaaagaatcagatcagatttttaaaatttattcattccttcattcaacaactatctattgagcaactacaatataccaggtactgttctaaacactgaaatacagcagggaaataaaggggaaatgttcctgtccttatggagtttaccctctagtgatatctatcaatatcacattaacattaacatctaaagctctctacacccaccccttagctgttgactcaagaattccaatcccttgcaaaaactcccccaccgtcaatgtatttctggtggccaccaaagaagtatcattcattcccataaatcagggcaggctgtcagttaccacttgattatgtcatttaattctatgagacattctatgtggtctttaactttaaaatatatcagcatagacagtagtttgtctgtgagagagtgtttgcatacgtattttaatccacatcttaaagtagttaattaccctagttaattgccctaattaaaaccaccttagggtggtcaattaatattcaaagaattctaatcaggaaaacactctccaaaaatgactagcttttgtgagactatattagaatacagtattccagaaagagttcccacagaactactttattctttagctatcatgatttctggtcaacaccaaaggtttattcattagcataaaaatgttagaaatcatttctcattggtgaaataaataaaagtgttccaggcactgcactgtctataagtatcatacagacacaccccctttactaaaatagcccaattgcttcaaaaaagaatccctagatttaggattctgaagagaggctggtgttacctagaatctactagaaatttaagttgaattctacctctaaaaattgtcctattaaccaatagagaattacagagagagctgggattttgtcacacttacagaatgagttagatgactgtttttgtgcctacctatctggaagaatttgagaatctggcctgagacttgctttcatgtagcaagtagcacctggtagagaaattttgaggaggaaactgaaagccttctacctgcaacgattataacatctaccatctacctaccatctactaaaaagaacccaatcataatcctcgaaggatctagtatttgtgaatgagcaaactggcttaggtccatttgccacaagtaggcattgttatcccactttaaagaggaggaaactagtaagatttagagatgttaaatcacttcatcaagttttcaaaattagtaagtggaggaactgaaatttgaaaagcagatctgtgcaattccataacctttatttcaaacccttaatcattatattattatgaaattctgcctcattattggccatctggccattttttacactctagcctttggaggcagagattggctctcaatccatgggtgagttataagcacactcattgcaaggtttaccaaccaagaatacatattaatcctattaaacctcctgtccacaataccactcccttgactttgggcacatttctctggcacattttggggtgtacaggtggttctagtggacatgaaggtcttttttagctgtatctgcctcaggaaggcagatgcagggcatcctgaaatcctactacttccctaagacactcttctccagaggattctgaatggaatcctgtagagagaaaaactataggaaagggccaagttgctaatcttattaaaatagttcaattgtttgaactcagatgcttgacagcatatgaagatgcactgatcagtttacaagcatgtaatccaatctagataatgttctgcctaaaaagggactacttatacccactctggcagcagcccagacgcggagctttctggttagagcagcaagatgcccaagccagtagactctaggacttcatcgctgctgggtagggtggctgccttctccccacattttgatattccgtacatgtgcataggcatgccagggtgacattgcctttctgttaattccagcactgcacatctgacttgtgttctactcagccctttatccttcctcatcacccatacaaatggccccaaagctccccaactggtgcctggtgttgagcagaaggatccactcactttgggattaataatatcttagcccatttgaccctcataacaaaatattataaactgggtaccttataagcaacagaaatttatttcacacagctctggaagccgggctgtccaagatcaaggcagatttggtggtgtctggtgagggcctgccttctggctcatcaacagtgccaccttgctgtgttctcacatggtgaaagggtgaccagagttattagcaccttataagggcactaattccatcatgagggccctatgttcatgacctaaccagttccccacagctccacctcctaataccatcaccttgggggttaggtttcgacatattaattttgaggggacacaaacattcagtctagagcaaacaatagtaataataataaagcaatcatttactaaatattttctcagggagcagctgatatccaatgacagctgatatgaagatgcaaagacccaagattctgtgattcaatctgggacaactctgacggcccttcccagcaacagagctcgccacaggacagcaaggcctgagttagaactgccttgtaggtcagcttttccctttgcacaatgcagccttcctcatttccttatagctgtatttcccaagagcactttctaataaaccttctgcatgcagctctccatctcaaagactgttttcatagaactcaatctaagataagacacatcttttcaaaggacagatccattgtgaactttagcaagtaggatccctccgtgtatcacaggggcttagggagccatggaggctccaagaggtgggacagctatgagactgaggccctgacaattggaaatgttcattagtgaaactatgcagtataatttcatagaagattattctatctggaggctaacagatggctctgaagccaaattcgggactctaattcaacagagagattctgctgatgtcaccagcacttgagctgtgtgttccagtgtgggctttttaagggttttggttgtcttttttattttttctttccacaaacagccatagagacttgagagttaattcagccttgtagtcactccaaggccatctgttgttcaaattaaaatacatatttttaactttaacctttcaatctctaaagttttaaacctttgcaatagaaacagtcattttgcaacagcttttcggcttcctgattcagtgacatcaatgaaaggggaatgtcagttttgggaacgtcagtaaggatcgttggcagggctgacattggtagcgggacatggagaatctaccaggttattttctgttcttgcatgacatggtaactaacatgctgtgctctcgtttgttggagtccatcaaaactctgattagatttaataaaggataatttgagaattcacattgcttctgaggcataaataaataaaaaaggagctagaaaaaaatgttgcagaatttaggctcctttgttagttctattaatctgctggcatactctaatgaggaagtcagaataaaatataaccaaagtgctaatttcttttgaatgattttttttcttattttaaaagtcatgtacattcattgtaaaaaataaggaaaatgtggaaaactaaaaagatacttctcctgctgtctagagattaatgcttttaacatcttggtatattacattcctatttacttatttatttttattattttagaggcagagtcttgctgtgttgcccaggcaagactcaaactcctgggctcaagcaatcctcccacctcagcctctcaagaagcttggactacagctgtatacaaccctgtctggctgtgctcctgtttttaaaggtgaatttaaatatctattttatgcagagatcgggtcactataatccatgatgtgttgtccttgatatttgaatatgctattgctaatccctgattaaaaggagcatatgttttgaatctgtttgatcttatttcttcttactaaaatgtatgattttttgtgccatccactttatctgtgacaaatgaatacatttgctaaaactattttaaactacacaaattaaaatggtatattacccttctcagttcaaattaattcaacaaccctttttaaatgacagttactatgtattctgcactgtgctagagaaagaataaggatggagttggaacagggagatacaactgtgaagaccacacagtcccagactctaggagctcgtatttccttattcatgcaacaaatatttattgaacacctactttgtgctggccatatggtcatgaacaataaggacacggtccctaccttcatggggcttaccttctgttaaagtagacagacaaaaataaatgagattatttcatatagtttgtattaatcatatttttttattttgtatatcttatgacattttgacacctgaaaaatcttgttgtctggaaagagacttttcctgcaacactagccaattcttagagatagttaaaagctcaggattgagctcttatgaaaggcattcctttcacatgccaaccaacctatccagagtctatatccccaactaccccctttatctaaccctcacacaccaagctaatattttccctgccctaaattatcctggaaccacgtatgaggcaattagagaccacctttatagcccaaagcccacagaaattatcaaaactagccagtcctaaagtatttattctgccctgtcttgactttcccatggaatctctgataaagaccgtggcctagactctcccctttctggcttctgcctcctaccaaaacctggtgctttctctgtggccctgcgtggtgtcgtatatccccttctcttgggaaatgtaagtaataagtcttgttccaatggcattgacctctccatgttgtcacctccattaactaaaatcactgagacatagtggtaaatacacttggccctccacattcgtgggttctgcattcatggattcaactgcctgcgggtcaaaaatgttcgggaaaaaaaagttccacaaagttccaaaaagcaaaacttgaatttgccacatgccaagtgctatgtttaattcaagcaaatgaaatgatgtgtaagcattgtattaggtattataagtaatctagagatgatgtcaagtatacaggaggatgtgtgtatgttatatgcaaatactatgctattttacataaaggacttgagcatcctaggattttagtatcctccaggggtactgggacaaatctcttacagataccaagggaagactgtacaatgaaggcaaaaaaaaaaaaaaaagtatgttctaaaaaaaagctgagggctgctacttcatagaagggatgaaaaaatgcttctctaaggagggggttttttggctaaaacctgtatggggaaaaaacccccccaaccaaaggattttctaaccaaaagtaacaccaagggcaaatatcctgaggcaaggctacctttgctggttcaggaaacaaaaaggccaggttggctaaaccaaaaaggaacaaaaaaaaatggaaaaggcaggggggccaaatttcttggaggccctaggaataaaacaaaccaaacccccttgcaaataaccttgacaatgctttatgaacagaacatattttttgcacttctttcaaagtctttggggatacaatactggggtatccacaagtttaaatctctgaggcaattccaggaactgtgtcacagcaaaattggtgacactttcaggtggatgtatttgatagcattcattaatctgtactctggcctttctcctacatttcctgtaaagtgcgtttttgtaaattgaaagaggactgttttcatccagcagtgctgagtgaagtaataaatgttacactgtgcataataaggtcaaaaacctagtgcaaggtgcatatccctttgtggtttgtgggtggggattgagggtggtaataagtggggggtgggaagagggtggttctccttaattaagttctttgttgaagcccagcttaccaactgttgggttcagagcctgcacatgactcacgattcacaagctggccctgaatcctcattagaatgaaatctaggtggcttagacctgacagcttttaaagtcagatgcaaaaagatgcattcgccttttcagtttggtgtgacataattttgttttcatttacctgccaagttgataagaatatttagtttctaggttcataaaacagactccaggtatcatagagaagggattttttaaaaattccccttttcccataatgcaaaatattttcttttgagtaaagcttgggctgcagatttactcaaatgaaagggagtgggtggagaatagtttattaacaacaataacacaagccaagctttaagcttagggctatacaactttatacattcattgttattacaaccctgttctgtagctactattattttcccccacttaatagatgaggaacctgggctcggagagtttaaatgactaggccaaggccagacagggagtgtggacccagatgcttggtggaccttgcattcaacccaggtctgtttggcttcagcctgcatttcccactgtacaacaccatctccccatgtgccatctcaccatctgcagaacaggagccagcctaccccacctttcatggttgttgtcaagaacacaggagacatatggtggcttccagaagactctacagatggccattttaaaacaagaaaataaaaggaagccatatattgggctgtaccctaactcgttcacaggcctcacctcagtggtaaagccaatggctttcttagtgctgaataggaaagaacgtgcatcctgtgaacatgaactgtgcagcaactcctggtgagttctcctttttatggaactgggaggctgaggtgggaggatcacttggggccaggagttcaagaccagcctgggcaacacagtgagacctcccatctctacaaaaaatttaaaaattagccaggaagcatggtagcccatggctgtagttccagctacttgggaggctgaggtgggaggatcacttgagcccaggtgtttgaggctgcagtgagctatgattgcaccactgcactcttgcttgcttgggcaatgaagcaagaccctgtctttaaaaaaaaaaaaaaaaaaaaaagattagatgtgattaaggcaaattttaagccaaaggtgatgtttatagagaaagttttggtctcaataaaacaaagatttttctaacaacaaggctgtcccaaaccacagtgggctactcaggtgagggtaggcatgagtggtcttgagctcccatccctgcagtggctccagcagaggctttatgcctgcctgttagggactgacagtgcagggagcacatggggaatcagtgttgatgtgctactatagcgccacctcactctgctcaggcaaccatttcacaagagccctttggcatgaatgccaatcaagtgtcactacacaagggaaaattctcctggtctgctgggtgtaagttcagaaggactttcatgttctttagttataccatagaagaagccaccatgcccatataaccttacctcctgggacaaccaggctctgattataggttctttccaaacttttctttttagattgctgtttaaaggttttccccaaaaatcactgaattatatctctatattttaaagcttaagggcatttttcactgaatttgaatactgggaaactttttaccattaaagcagccttatattttaatctactctggtcccatagtggttgtctccaccaagaagagcagttgaggctggaatagcaaggagaggaaaataagaagagcaatttttcagcctgtgtgcctcctcccaaagggactcctttcagcattttcagtgtaatatatgttgacagtactgttactaaaatgatcattaaaaagatattggggaagaaaagtaaatgcaggagcatagaacagatagataagattaccaaaggcttggacacagggacacaaatgttctgtgttctacatcaccccaagccaaggtgcaggcatcccctgactccccactgcattcacctcacctataggttagaacagagtgttacttgtgccaatgaacacacgtgtcaaacatcccctttgtgcaaaacatgtgttggacactacctttaaggagcttattgtcttattgaagatgaaaactatgaatgtatttaagctgcacactgctcataaaataattaaaggcagtttacagagaaaacaagggcaacaacataaaattggctaatataaaaatggaaaccgtagatgaatagataaacaaaacgtggaatatggaatatatataaatcaaatattattcagccttaaaaggaaggaggttcttacacatgccacaacgctgacgaatcttgaggacattatgctgagtaaaataagctagacgcaaaaggacaaatggtgtacaattcctcttacatgaggtatttggagaagtcaaattcatagagacagaaaatagaatggtggttgccatgggctggggagaggggagtatgaggagttattgtttaatggtatggagttttctcttggaaagatgaaaaagttctgctggtagatagtggtgatggttgcacaacaatgcgaatgtacttaatttcagtaaactgtatacttaaaaatggttaaaaggtcaattttatgttatatatgttttacaacaataaaaaacagattggactctaaaggtttagtacaaaaaaatgaaaaatatctcattaatactttttttctgcattgattgcaagttgatatgataacattttgaatacggtgggttaaattaaaaatattattcttaaaaatttttttaatgcaagctatagaggaagaataataaaatcaaagaacttcaagggggccagcgtgtgcatacatatatgaagtgacaagtgatgtttacaacagggggtgagtatgtttgaggcaaccaagactctatgcccaacctcaatgcattcaggttaatttattttatttatttatttattttctttttgagacggagtctcactctgtcgcccaggctggagtgcagtggtgcaatcttggctcacagcaacctccagctcctgggttcaagcaattctcctgcctcagcctccagaatagctgggactacagtcatatgtctccatgcctggctaatttttttgtagttttagtagagatgggggttcaccatgttggccaggatggtctcgatctcctgacctcgtgatccacccacctcggcctcccaaagtcctgggattacaggcgtgagccactgtgcctggcccaggttaaatttttaagaaaccccatgtgttggtctgttctcatgctgctaataaagacataaccaaaactgggtaacttataaaggaaagaggtttaatggactcacagttctacatggctggggaggccagacaatcatggtagaagacaaagtcagagagcaaagggacatcttacatggcagcaggcaaaagagcttgtgcaggggaatgcccctctataaaaccgtcagatcttctgagacttacttactaccatgagaacagtatgggggaaagtgcccccatgattcagttatcccccccggctccatgcttgacatgtgaggattattacaactcaaggtgagattttggtggggacacagccaaaccatatcaacacacttaaacaaacaatcacgtcctcagtctcaatgacctggaggcaacagttactggcatctgacatagtatgttacacatttgctaagggtgtgcaagtttggcttgagttatccagcagccaatgtgaaaagagaaatttagccagttgcacagttcacaaggtagtgagataaaaaccaagcagttattcagaagcacatgtggtattgatattgagatagaaaagaaatatctcctgagggtcttgtagaaagaacactgcaatgtagtgaacaacatccttagaggttgggacaaagtcccatggaatttttctcaccccatccttcatttgagacccattatttcataaaacagtgtcacaaaaaacagttctgccagaggccagccatccagtggaagacaaagtagtgctggacgaatggtagaggtgatgaggaatgtgagtgctattgtcattcaaaggagagcagacttcataaggagtcatgtgcgaagaaaggcagtgggctgaagctttaggaaagggagggtttagattcttgcctgatccatggtgggtacactggaagtatttgtcgcacgaatgactgtatagatgtcctagtccattcaggatgctgtaacaaaacaccttagactgggcagtttataaacaacagaaatttatttctcacagttctggagcctgggaagtccaagttcatggtgcagcagattcaacgtctgcttcatgaactacgccttctacctgtgtcctcatgtggcagaaggaacaagggagtccattgaaggctgttttataagagtgctaatctcatccatgagggtggaaactgcatgatttatttattcacttcccaaaggctccacctccccccacctttttttttttttttcctgaggtggagtctcgctcttgttgcccaggctggagtgcagtggcatgatctcagctcactgcaacctccgccttctggcttcaagcaattctcctgcctcagcctcctaagaagctgggattacaggcgcccaccaccatgtcccgctaatttttgtatttttagtagagatggggtttcaccatgttggtcaagctggtctcaaactcctgacctcgtgatccacctgcctcagcctctcaaagtgctgggattacaggcttgagccactgcacctggccaaggctgcacctcttaatactatcacactggttttccagttccaacatatgaatttggagaaggcaccaacattcagaccttagcagtagagaataacacacacacacacacacacacacacacacacacacacacacacgtatttcaaaaccaaaaggatagaagagtattctggagggcaatctggctggctgaaggatatcagtcaggatgttcatagcaagtgacaacaatctaacttgaccttgatttttaaaaaatggaaatgtataccatccaggacataggcataggcaaagacttcatgactaaaacaccaaaagcaacggcaacaaaagccaaaattgacaaatgagatctaattaaactaaagagcttcggcacaacaaaagaaactatcatcagagtgaacaggcaacctacagaatgggagaaaatttttgcaaactatccatatgatgaagggctaatatacagaatctataaggaacataaacaaatttacaagaaaaaaacaaacaaccccatcaaaaagtcggtgaaggatatgaacagacacttctcaaaagaagacatttatgcggccaacaaacatgaaaaaaagctcatcatcactggtcattagaaaaatgcaaatcaaaaccacaatgagataccatctcacaccagttagaagggtgatcattaaaaatttaggaaacaacggatgctggagaggaagtacagaaataggaatgcttttacactgttggtgggagtgtaaattagttcaaccattgtggaagacagtgtggcgattcctcaagcatctagaaccagaaataccatttgacccagcaatctcattactgggtacatacccaaaggattataaatcattctactataaagacacatgcacacgtatgtttattacagcactgttcacaatagcaaagacttggaaccaatccaaatgcccatcaatgatagattggataaagaaaatgtggcgcatatacaccatgcaatactatgcagccataaaaaaggatgagttcatgtcctttgtagggacatggatgaagctggaaaccatcattctcagcaaactaacacaggaacagaaaaccagacaccacatgctctcactcataagtgggagttgaacaatgagaacacacgggcacaggaaggggaacatcacacactatggcctatgaggggggtggggggctaggggagggataacattaggagaaatacctaatatagatgatgggttgatgggtgcagcaaacctccatggcacatgtatagctatgtaacaaacctgcacattctgcacatgtatcccagaacttaagtataatcataataaaaaaagaatgcgaaaaaacaaaaaaaaaggaaatgtattggaagcatattggaatatctcacatcattaaaagaagttgaagatcaaacatgttgaaggcagggtaaaggtgggcctacatggtggacatggagaagtgccgctcagataccctttcacagaacaatatgttttcccagatgctggccatgtggtcagtagacagccttcatctatcatctacttcagggtttgcctcagatgctgagagttgccttgtccaagagcttgcccttccctgggtagcccatatccagtgactaatcactgtggaagtataaaggccagaacatctcagctcatgcagcacaatttcaatgggccatttatgctcaatggacttattatgctcaataattctctgtggagttgtcagacttgcattgagttcagtttcttcctcttcccaatcttgctttctcttcctccttcccataagtgctggtccctaataaatatcctacaccacaaattctatcacagggactgtttcagtaaaacccaaccttcgacagccttggaaatgaactcaaataccagtaggatgctctctctgtctctcatatctccatctttctggatctttgcttctgactcttccactctagtttgcttctccaaacactgggaaatctgatcatgaagagtttctcttaatgttagccaccgggggaaaaacgttagccacagaaatgatcagattgttattgcttggtttctgataaaaactgtttaaaatcccaggaaaggataacaaatggcccagctggggtcaggtatctacccacaaacaaattcaggcctggatgtcaagacattataacaggccaggcctgggtcaaaacctatttctcaggaatgggatcatatactaacaaatatggcagccccatagacccatggggttttggagaggattgctggacaaaaaaacatttaacaaaaaaaaaacagcagaagcaacaacaacaacaacaacaaaccacattatattctctgtattttggggagtactagcaggttcctttgaaagattaatttaggatttgtatgttaggtgtacgagttaaaatatttttagttaattggctttcaaatacttagagcaacaggactctttttcagacaaaacttactcaaaacacctacataataagcagataataatggagctgctgatttgataggaagtaggagccccagaatccaatttcttgtctttctctaattccatttcccagcaaccaatgagccacctcgttcactcattcaacaaatattcattgaatatttctgcctccacattgtgctaagtgatagaaagatattcgttgagtaaaaacaaacataatctctctttctggagcattctatgtatgatcgtaggacacagtttgaaacccactattctgggtaatattggggggttggggagaaggacaatgaaggattaagatagaaaagtgttgttttagaaatactgacctggtggttttagatgttgttaacccaatttggggaatactagtcatgttgattaactggaaaactattgaaatagccaagacatgaaatgtgtggtccaaactagagaaaaggcagaggaaatgaagagtgaatacaagaaatataaggtaagaaaaattgatgagtcttggtgacaacctcttaatggatctggctagtatctattaatgcatgatattaaaacaatcccacatacatttagaggcactaagtctcccctcccacttttcccactcaatcaaatttgcaatatattccaatccacatcactgcacttacacattaatcattcatgcattcttgacagcccatttcagtcctattctttcagcaccctgaccactcacacatgtttcttatggttccaagtacaacagtctctcctggctgatggcagcccatcacattcctcatgtcctctttgcatataactgtaatcaatattaaattcctaaaaatttacagttcaactaacatcaaatactcctttagccaagatatcattctctggcttctcagggacttgttttgtgtaatatgcaaaaaatttttaatttccctttacatattttaagttcagtgtgtggttatataagataaggtctatttttctggccttggtgatgactcagtatttttgaagcatcttgggctgaagatgcttgcaccattacccccttgtacattcactttgcaatttagatttttctaagaattttgcaagattacctctagaaagatccttttgaattattgctccccactaacttgtcacagttgagggaaactgaagagactacattctggacttttaagctgcagccttgtgttcttttgctactagaagatacaagaaaaggcaggggcacatatactttatgacaactcaccataaaggagcagggtaatttttattggtcactgaaatcctattcacaggcaaatcactgcaggcaaagattcaaacttaatttctgcttcagtgccttttttctttgtgtattagagttttgtctgcatattactaagtatctacctaggccacaagcaacttgaaaacagagactgtgtattgcatgtcctaatatctcatacactactttattgggcacacagattctagaccacatttcatttatgtatttattcatctcacaaaaatttattgagtacttactatacaccaggcactgttctaggtgctcgggttacggaaataattaaggaaaacatggtccctaccctcatggggcatactgcataacagaaaaattagaaattgaacagggaggatctgatagaaaagacaatattgaacaactaatagaagtatgatgaggtttctaaaagggaagtgcaaagtctgaaagaacaactatcgggagattaccacccctccctcacttatcttctgaacatccctcctcccctgcctcatccctcccttgatccatgagtgaaactggcatcggggacacaaagcctgagtgtcaccattctgtgacttctgtgtctcttggggcccctattggttaacatattttggcacatcaaagcaagtgactcaagcacaagcttgatagtagctcccaggagggaacaactgagagtgacaaacctacattcattcattcattcattcagcaaacatttattgagcatttattctgtgccaggtactatgagcaaaacagtcactgccatcattagagtactcatgtgctgagaaagatgtattttaagcaaaggatcacacaaataaatgtaaaataagtcccacatcatgctctagagggttaggagtatatataatggagggatttgacttctgtaatatattcaacacaagtaacccatgatcttatgatcccaaagcctgaactctcaatgtctatgtcacactgaaaagtcagcaagtgcatgatcgctgccaggccattttcccccatatttaggcaactctgattattagaagagttcttccttctatggaacctgagttggcactctacacagtatcattgttctaaccacaggaatcacacataaaaagttgacatgacttttttttcgaacgttaaaaacaacaacaacaacaacaacaacaaaaaactagcaaaacttcttccatcccaatcctggatttcaaaccttccattccatggcatgcttataaagttcccaccccatctttgtcacttccctttggacttgttgtatagcccaaggttgactgacagatagctgacacaccccatttccctatcttcatactcatggaaaacattgcatattgatccctatgtactttactaatatgcccagatgaagtcttgtaatcaatttcagcacagctctctagctctgatcaatcaagtagtgttaacaagagggtgaaatcttgttgctatccaagcctagccatgtccctctaaaagtgaagtgtgcagaactaaatacaaggctcaacactgggttctaatactggatctaagctaaccaccattctagcctcattctgaagattttaaactttattatcaatgcttccttccctagatgttccattacctggcatgctcttgcaaataatatatggagtggtgacatacaggcacataaatttatatcctgccttcactattgaccactttctatttatttaatacttaaggctcattgtaaccatttgtaaaatgtagctaacaatgcctgcttcacagagtggttgtgaagaactttgagacaatgtaagcatatttaccagatctttgatacattttctagtgtattttttctttcctgaccacttatggcctaggacagtcttttcctagttctagatcaaccaaaagactccacaaaaaattgtaaattactccagaaaaactaaaataaaatcaaataaaatgttcttggtttaggtaagtgaacagtataaagatgtcagttttctcactgctgaaagaaatcaaagattacacaaacaaatggaaaaacattccaacctcatggattggaagaattaatattgttaaaacggccatacagctcaaagccatctgcagattcagcacttattcctatcaaactaccaatgtcatttttcacagtattagaaaaaaactattctaaaattcacgtggaaccagaaaagagcccaaatagccaaagcaatcctaagcaaaaaagaataaagccagaggcatcacattacctgacttcaaaggtacattacctgactataaggctacggtaaccaaagcagcattgtactggtacaaaaacagacacatagaccaatgaaacagaatagagaacccagaaataaagctgcacacctacagccatctgatcttcaacaaaatcaacaaaaataagcaatggagaaaggacttcctgttcaataaatggtcctggtatagctagctagccatatgcagaagaatgaaaccagtctgctaccttttaccatttacaaaaattaaaatgaattaaagatttaaatgtaagacctcaaactctaagaatcctaggagaaaacctagaaaacaccattctggacatcagtgttgggaaagaatttatgactaagtcctcaaaagcaattgcaacaaaaacaaaagttgacaagtaggacctaattaaactaaagagcttctgcaaagcaaaagaaactatcaacagagtacagagataacctacataatgggagaaaatacgacaaactatgcatccaacaaatgcctaatatccagaatctataagggacctaaaaaactcaacaagaaaaaaaaaactcatgaaaaagtgggcaaaagacatggacacttctaaaaagaagacatataagtggccaacaaataaacgggaaaatgctccacatcagtaatcatcagagataatgcaaatcaaaaccacaatgagataccatgtcatagcagtcaaaatggcaatcattaaaaagtcaaaaaacaaatgctggcagggctgtggagaaaagggaatgcttatacactgttgatgagaatgtaaattagttcagccactgtggaaagcagttttgatatttttttttaaatatggaatctcactcttttgcccagggtggagtgcagtagcatggtcttggctcactgcaacctccgcctcccgggttcaagtgattctcctgcctcagcctcctgagtagctgggattacagacatgtgccaccacacccagctaatttttgtatttttgtagagatgggattttgccatgttgaccaggctggtctggtctggaactcctgacctcaagtgatccgcctaccttcagtgtcccaaagtgctgggattacaggcgtcagccactttgcctggccgagatttttcaaaaaacttaaaacagatccaccaatcaactcagcaatgccattactaggtatatatccaaaagaaaataggttgttccaccaaaaagacatatacacttgtgtgttcatcgcagcactattcacaaaagcaaagacatggaatcaaactaggtgtccatccacactgaactagataaagaaaatatagtacatatataccatagaatactatacagtcataaaaggaatgaaatcacgtcctttgcagcaacatggatgcggctggaggccattattccaagagaattaatgcaggaacagaaaacaaaatatcatgttctcatttataagctcaaatcactggagtaaagatggacactcttaaacaaatggtcctgggtagtcatttggagaaagacaaaattagatccatctctcacatcatccatattaataaacttcaaataaattagggatctaaatatttaaaaataaaactgtaaaagtactagaagaaactatgagtaaactcatttttaatctcagtgtagggaaaagttttctaaggatgactcaaaatcccaaggcaataaaaaataaaaaaaatcagaggcaataaaaaacaaaatttataaattttactacttgaaaataaaaaatattttatataacaaaagcaccacaaagaaagtcaaaagcgactgataaaactgagagaaaagatttacagcatataccacagacaaagggctaatagttttaacatatgaagaactcttaataactgagacacaaaagactgaaaactcaatttaaaaaaataggaggacaggcgtggtgggtcatacctataatcccagcactttgggaggccaaggaaggaggatcacttgagcccaggaattcaggaccagcctgggcaaaatagtgagacccccatcactaccaaaataataataataatagagcatggtggtatgtccctatagttccagctactggggaagccgaggcaaaatgatcacttgaacccaggagttggaggctgccacgagccatgatcacaccagggcattccagcgtgggcaatagagaaattctgtctcaaaaaaaaaaaattaaaattaagaatataaaaaatgggaaaagacatgaatgggcaattcacaaaaactggacattaaaaatggccttcagatatatgggaaaatgctgaaattcattcataattagagaaatacaaattaaaacacagtaagtatcatttctcaccagactggttaaagtttaaaaacttgacgacacattctgttggtgatgctgtgaggaaaaagtcatttttatgggttttatgtaccaattatacaaatggtacaacccttctggaaataaatttggcaatacctaacaaaactacatacatttttacctttcaacagcaatcccacttctaggaatctaccccaaagatatactttcaactacgcattaatacatatatgcaaggttattcattgcagctttgtttgtagctgtacaatactggaagcgacccaaatgcccatacatagtaaagtggttgaataaactatgatacatccacaccatgaaatactatgcagtggtaaaaaaagaatgaagaaggtctctgaacaggcatggcatgatttccaggacatactgttaagtgaaaaaggcaaggcccgaaagagtatctctaggacataagaagaagatagaaaataccaaggtgtctgctcttttgtgcaaaagatctaaaagaaggataaatagaagcttagtagtgtggttacctaaggaagcaagtggaaaaagagaagaaaagaggtgaatggaaacagagttttagggatgaggagggagtcacacttctccaagtactatttttgtatagctctgactcttagaaccacagtttcacaaacccttcacatatcctcaaaataaacaaaaacttaaaatcaaccaggatgcaaggaaaggagaacccagaaccgagtagaaacactaacaaatgaacctaatcatacacaaatgaataacataaccacactgaaatggatgggtaactaacctaagtaaatatgggagatagtgtctcgataggccactgtgtggctaaaaaacattaatttggcctaactgatcagacaccgacttaaaacaactgatcaagataaagtcctccagcaataagacatatcaagatcattactcctggataatgataccttgagaaagatataggtgtatttttgtagtgctcttgccaaaaacacacagcctcaatccaatcatgagaaaacattccaaattgaatgacattctacaaattaactgactggtacttattaaaagtgtgaatgtcacaaaaaaaaaaaaaaggaaagactgaggaactgttatagacttatagactgaaagaaactaaggagaaataaataaatgcaatctgggatcactgttagcatcctagcacagaaaacaggcattaatggaaacattgatgaaattcaaataaggtcttctgtttagttgccagtattgtaccaatgttaataccccgttcctgatcattttattaggcttatgtaagatgttaactttaaggaacatggggtaaggaatataaggaattctgtactacttttactatttcataagtctaaaattggtttaaaattttaaaagtattttttaaaagacttcaatgggaagtagagagggccattgggtcttatgatgttgggaacccccagcagagcaggtatcccagtccttgaaagtctgtggccttttgtgcctagagttcatatgagagcctagagctcatatgtcaacctcaccactagagttgaggtaatgctcttcaaccctgtggcctgtggcccaaactaggggactggttaataactcacggtatattcatacactgagatgccaaaggccaattaaaaacaaagttgtagactatttaataattctatatcatgttttccagaaattaaataggttaatatagatagatagagacagagagagagagagagagagagagagagagattgacagagagaaaatttggaaaaatattctcccaaaagttaatagtagttaccactgattggtgaccatatatcctctgctaaataaataaaaaagagttattttaaaattaagcaaggagacttctggttttaaaatggtggagtaaaaacatctgtctcctttctcttctccaaagtcacactgcaacaagcagaagaaggaaaacagaatgcaagttccatccttgagaaaactaggaaatgactgtaaatctgaagcatgctatgaggaaggggctgcctaatgtagagtctactgggaagagcccagtgggaagagcccattaaattggcccatgaggaagacaaagccaggacccaccggaaaatgcagagcccagacaaccctgcagagcatgtgctctcctaagaagtgggacagcaaccaccaattccttgtctaaacaatggtgctggaacatgcaggcttagaggggaaacttctttggtgcttgtttggcaccttagagaagtagggaagctgggactgaaagcagaaccgcacagacatgacatttcaacaggaagcaagttattggtgagatgaggcaggatagaggaagatcctgaactccaagctggcacttttggtaagcagtgaaaaaataaaggcaaagcgattctcttgcatacccacgtactcacactaacacaactctgtgttataaaaagctttattaccatatcagttaagatgaagttcaactacgtatcaaaaaaacccaaaaaactttaacatgattatttttctctcatttaaaagaatttcaaatgttctaaaattgattgtggtgatggttgcacaactctgtgaacaaactaaaaaccattggattgtacactttcaaggggtgaactgtatatataagttatatctcaaaaaagctattttttgttttaaaatttcgaggaataagatttgtatagtggcttcatggtgtcatcaggaagccaggctcctaactttctgctctgttaccctccgtacatggcttccatcttcaagcacgcctcatggttttagatggcttctggagctctggtcattaaatccatattctaggctgcagagatgaggaagaaggctccatttccctctcacatttaaggtacttacctaaaagccaactcaacactttttctttacatattcttggacgaagatcagtcacatggctataaccccctgcaaggaaagttgagaattttagggctatagctgagcacagtgacaatgaatagaacctggtttctattgttttagaagaaaggagaaatgagtgttgaaagatacaattagtagtttatgccacaactatgaaccatagaaaattctttacagctcaaaacataaccctgtcctatctcctgcaaatagtcagaaagaacttatctcattgaaagataaacagtgattaaaaagaaaccagtatacaaactatgtaaagatattgcaagaaaaaaaggaggaaggaaacagaaaaaacaaatggcagatgaagaaggaacatttgtttttttaaaaaaaaaaatgttgtcaccaggcagacaaaattatgatcaagcatattgtcatatattttaagaatttttaacaatcttaaagcagagatacaagagccagggaaaagatgaataggcattactgaaaatactataagatacacagaatacggggctaaaaaagtaagcaataggaatatatatgcaaaaagatagaactatacaagcccatcaaagttaaatgaaaatgtagataactggcatccttggattataggtgttcaaaacaacattcaaaaataacaaaaaagaatcaaatgtacagtgtgataagaaaaactgatgaagaatgagtgacactaagattagcctaaaagttatgagatttcagagataaaggaaaaaaccctttaatcatgcaaaaagaccaagtcattaatgtaggtaatggaagtgtaggtgggaatcaagttgacctctggtatctctacagctttatttacctttagaagatagaggcgcaatgcttacaaatttcttgcagtccagagagtttaattagctaatcagttagaaaacttttaaagtaaaggaccagatggtaaatattttcagctcgtacaatctctgtcacagctactcaattctgctgttgtgcctgaaagcagctgtggacaacatataaatcaaagggcatggttgtgttctaataaaactttataaagacaggcagcttattgcatttggcccttgggccataatttgctgatccctgagctaaactatcattcaaatataaaggcaaaagagaagcatttttgaagtttgacatcttcaggcatgtaatccacataatctaaagtgttagaagacaaactttagtgcacaaaagataaatgaagaaagtgaagcaagaatactggcaagaaataaaaagctaaaatatgctctactacctggagaacagaaaaagaggcataccttccggctcctttggcagcaagtgccttagaagccccatgacgtgaaaggataattcaagaaaccaagacatctgttggaagccataaaaattatgatcagttctaaataaagaaggtgatgtcacatttgcagagcccttttaaaaacatctagagattcacagagatatttagattgttaacccacagtaacagctaagtaagaggggcctcaattttctcagatgtgaaacaccagggttgaattaaatcagagacgcctcagccctgactgctcatgagaatcacctgaggcattttttttaacgtctatgcctgggttccatcccagaccacttaaattagaatttctggagatagaaaagacagtatttttttaaagctctccaaatattcagatatgcagccaagggggaaaaccaccaaattagatggtttgtgaggtaattatcaattcagatattctataaatatatatgtatataatgtatatataaagaattatccaaaacttaaaaatttagaaattgctacataaaagaggcaaaactacttagtcaattttggatgcatgtttctattacagaactttgaattatggtccatactggtctacgtcacaggggcttctaaaaaaaaaaaaacctaaagacttaatgccatcctgatgtacataaactagtacttatttgtgaataaagaaaaaagtaggtaacttcttctgacaaggtaatcaattccttacttttaaaagaaaagtgtccatgtcaagtatttgtaaaatgtcaaatgttccttagttttgaaagtctaaggttttggcatggcgtttgttcgcttttaaagagcatttctttccttttttttttttaataaagttttatttttccaaatgtacagttggttggacctattcatgcatcttcaccagcagctgcagcatctccgcccttggtatttctggtgtaaattactttagctctgtgctttgaaaccagtttgataagtcctttactaaggagctcctgaagggctgccctggccagggagcctcgaatcttcagtctctcagagaccacagctggggttataagtttataattgggaacttccttacagagtttgtcataggtagctttgtcaaacaagactaagttattgagcttgtcccgaactttgcctttggaccacttcttctttttggccttgcccccggatttgttaactgggtctttgtctttcttggccgactttccagcatccttcttcttgtcatccttgggtggcattgtgaagctcggacagcagcagcagacaccgcagcctcgctgagatgtcggacaaaaaggactaaagagcatttcaataagactgatctctaatctacttactgaactgcttatttccagaaattagcaaactcaaaaagagatttaaacacatgaagaaaaataaatgaatctcaatacagaaacaaaatattttcctagagaagccagataatcagtaatgattagggtgacaatagtctcagtttgcccagggcaatcctgatgtgcacctgttattccagagtaattattaatagtgttccctttcactcttacatattttctgatgtaggtaagaaattatatggtaactctacttttgatgctaacaataataaacgagttgtatctcttcattagagcagatacaaagatccatgcttggaaatatattaacgatgaacaatgaggccgggtgcagtggctgacgcctgtaatctcagcactttgggaggcagaggcgggcagataacctgagatcgggagttcaagcccagcctggccaacatggcaaaacctcatctctactaaaaatacaaaaattagccaggtgttgcggcgtgcgcctgtagtcccagctacttgggaggctgaggcaggataatcgcttgaacccgggaggcagaggttgcagtgagccgagattgtgtcgctgcactccagcctgggcaatagagcgagactccatctcaacaacatccacaacaacaaaaaacaaacaaacaaacgaacaaacaaaaacaatgtatcctcacaattaggaaccaaatctttaccagcagtgcataattggtaatcagtcttagtctgtggtgtgggaggcggagctaaatcatgcagtagaggcaacaattaatgttttcacaaagggatgtcaagagatatttaaagatagatgctagaaatccagttggaattgttggtaatgggagcagaagagtttgggtgggaatcagaaatgacttgctaagacgctgggaggaaagcagatccaaagaccagggtcccagggaccaattctgatgaggaacaataaggggagggaaaaaccccagacaggagccagggagggtctggtatagaacaattgtgcgaagaaacttctggctgttttctccagctttttattgacctaatctcaccacaaggatgtcactcagagaattaaattcctggcacttttgtaatttctacaaaaaaaaaattaaatgaagtctattctggcagattttgttaattcagacttttaattaattcaaactgctcaattacttaaaaaaaattttttttcaagtcagtaagcctgactttcaaagaaaaccaatcaaatggtttttgaagataattatcctggactagtgttatttgatcttctaagattttcatgtgttaggtggaaaattaaagtctgcaaggaacacaaagataaagtgtcagatcagtcacatcaatcctgcccagggcaatactgatgtgcataatcagtcaatgggggaacaaatgtcactgtcacatcttcatgtaaaagaaggaatgtgacagcattctaaaagtgagttataatacttattcattcaacaaatgtttactcatcttctattatgtacatggcagcatgcttacgtggcaaattacgggtgtttgtgaaaacgtgaaaaatgaactacgacagcaataaataggtatataatggtaatggaaagacacctcatggcatccttgatctattcattctgagaatggttcattacttatggctcctaaaaaaggcatggacttaatcactaagttagtaatctatgacccctcaaaagcagagcaacacgtcaagctcttggctttccatgtgctgggttcagatcctcaaaagtctcagcttcatttcttatcctagggtttaataagccatccccattcccttccaataaattcttcatttacttaaattaatttcagtggatttatgtttgttgcaaataaagaccttaagacagataacaagggtgaatttgatattttaatataagaaagtaacaattaatagtgttccctttcactctcacacattttctgatgtaggtaagaaattatatggtaactctaccattgatgctaacaataataaatgagttattattaatatttggtataattccagtgaagaatatgacaactaaagagaatttcttctggaaatgaatggattaaatataaaaggaagggggaaagcccagtgatacataagatataatcttaatgggaattcttaaacttgtcaccaggagcatagtgaagaccatttgggttaagacaaagtgagagagaaacagagttaatcattatagaagaatgctacagcctattcaatcaaataaaaattacagataattaattcatttttaaaatatactggcagccctgagttttcataatgacatatttatactcctaaatttactttaatacttgaatttggacattcatccatgaactttttaaaatttttaatttaagttccaggatacatgcgcaggatgtgtgggtttgttacacaggtaaacttgtgccatggtggtttactgcacctgtgaacccaccacctaagtattaagctatccatgaacttttgaaaaatgtttcaagctatcattgggtgaaattggccattggttggccaaaacagcttagttttaacaatgtagccacctttgaccttaatacagtgtatatgcaattatgagtatctattatatctctgtagttattttctaaaatatgagtgtggaataaaagggtgaacatattaatgctactaataaagaatatattttcctaaacttattacaattaaaaccaagattgaggtcattaggtatgtcaaaagtagcccatcccagcctgggcaacatagtgagaccctgtttctgcaaaaaattaaaaattagcctggggtggtggcacatgcctgtagtcccagttaccctggaaggtgaggtaggaggatcacttgaacccaggaggtcaagcctgcagtgagctgtgatcataccactgcactccagcataagtgacagagtgaaatcctgtctgaaaacaaaaatagcagagcctttgccatcaactgaggtcattggggtcaagacgccaaactgatgcttggttataaaggaacaaactaatattaaagaaattgaattaaaaagtagaacatcatcaacttttattttatcttttctttcactctgtcatccaggctggagtgcagtggtgcaatcatagctcactgcagcttcaacctcccaggctcaagcaatcctcccacctcagcctcccaagtagctgagactacaggaatgcacctccatgcccatttgcttttttttgtagagatagggtcttaccattgatcaggctggtctcgaacttctgggcttaaccaatcctctcatctcagcctcccaaagtgcttggattacagatgtcaaccactatgtcctgtcaacttttgtcttttctaaaagttgtggtataattaaggattctttattcttctggaaacagagtcctccattataatgcctaagtctacgattcaatatgtgtggatctgatttcctgcacagtcttggggacattcatgtactaaatataatggactgcttctatgacaaaactggcacagaggtaagctatatgttcatgggaaactctcacaacatttactagaagtctttgcagctcaaagtaaagtagttaaaaactgttttacttaccttactgacaatatcatctctgaaatgatagcagatacagcaaagagactgctatttttggaccaatttctgtcttacaaggaagaactgaatggttaccatgtcatcttggaatttgtaataagaaagaaaatatagggcagaggctggcatgtgctgaagatgttaagaaagcagatgtcaagaacttcaaaggaaaggaaggagctatagcacagagggtaaaagctcagactatagactcaagaaacatataagtttgaatcccaggtgcgagacttaccagttgtgtgacattgagcaagatatttaacctctttaagtctcagagttttcctttgtaaagcaaaggaaagtgcctaggaaaatcacttaacctaagcttgttgttttcacttggaaaaatgaaggaagtaatagtatataccatgtaggtttgttgggaatattaactaagaaaatgcacataaaatacctagcactgagtttaacaaaaagtgaacatttttaaagacacacacacacacacacacacacacacacacacacacacattatttacagtatttcatggactctaaaattctaagaaagaagtaagaaattcatgaaagaaactagtctgcctagctccgatttaaaataaatataaagtgaaataaaggaggatacaactaataacacaaaaggatatcattgctattattatcttctaagaataaagttttaaaaagctattgctcagaaagaaatgaggttggccgggcacagtggctcacacctgtaatcctgtacagtgagccgggcacagtggctcacacctgtactttgggaggctgaggcaggtgtattaccggagtccaggagttcgagaccagcatgggtaacatggcaaaactctgtctctataaataacataaaaattagctgggcttggtggtgtgtgcctgtagttgcagctactatggaggctgaggtggaaggatcgctttgagcccaagaggccaaggctgcagtaagctgagatcgcaccactgcactccagcctgcgtgacagagtgagaccctgcctcaaaaggaaagagagtgagaaaggagggggacagggagggagggagggagacggggagagaaaaagaaagtaaaagattatatttctcaagacaaaatgatttcctcagcattcaaatacttcttgggaacatctatgcataattaccagatgaaaagaaggcaaggctgcataatttctatttgaggtctacattttccagcaagaatggtcctcaactggctatggaagaagaagccaggcagagtgtatgtatcaacaggcgtatgttaacagagagaaagggaagacacagttcctactttacatggattcaggtctccagacctctacactaggtggtatctcaagactttttgcaggataataaatgcaattgtttggaataaaaagatttgttggaacaatgaagatctgaaattattccgtcaaagaagcatatataaagatagagatatgtttatttaaataaattggccatctagattcttcatggattttattgtgctttataaagcacacatagtttactttgatgcattcttatgtagaatatttaattatttaagccaaataagatgtttctaaagccagtcaaccattagtagttattatccattacaaaaatttgctccatcattcttaggactgacaaggaggtcagtgaaactaattcttaatcatccaacaaggttttgagtacttattatgtgccaagcgaactgggaatataaaaaatgatcccttttttatatggggaggtacccaactatgtgagcaggttggagttcaaaacatagtttgacatactaagcataggggcaagaaaactgctgcaggaacacaaagataaattctgagtcaaaagataaaagaaaaggaaggttgtaggtagggttgatagaaaaaccaacaagttatatggcaccacaaatcagaatgggcctccaacaaagcagaacacacttgggttgtaagtactcagtaaaggaatacttacaggtgctagctgaaagctagccctagttagaggggaggcctcaaaagagtaacaaaattttgataagtgtagagtggagggttgggagggactctaatttgagggaagaaaatagaccaaaaaaagtattgcataatatgcaaccaaggacttcaagttttttgataggttgtcatggctgatccacaagatttgcataaagatgtacgagatgtggctgaaaaagctattgaggatcattagtaactttgagtaccagaataagagtttgaatttaattacataataaccacaataatagctatgatttattgagcacatactatgtaacataatctttacatgcattatctcatttaattctcacaataaccctataaggaagggaaaattataatctctgctttacaaactgaggcttaaagatgtttattcactgcccatgttcataaagttagttaagtgttggaatttaaattcaaatccatagctctctaaatcaaaaactcgtagcccaaatgacaaagctatactcccttgacagtggagaaaactgggagcaatgagaatttttaaagggggagatataatcaaaactacattctataagacagaatacagtggatataggggcagtggatttcctggagaagtgaaaaattgaaaatgacaagactagttagaaagttattagttcaggtgagagacatgaagacataaatgagggccatagtaatagagaaaaggggatagataaagacactggaaggggagaatgaagagaacttaatgtgttagttttctatgctgcatagcaagctaatgcaagtgtagtcagttaaagcaacatacatttgctatctcacagtttgtgggttgagttcaggtgtggcttagctaggtgtctgctcaggtctcacaaggctgcagtaaaggtttcagttgggttacattcctatctgaaggtttgactagggaagaatctgcttccaagcttaattgggttgttggcagaattcatttttttttgtagttatatgactgacttccccatttttcttggtacttactggctggaaaccacctcttagctcctagaggtcactctcatattctcaccgcatgctctttcttctgatcacattacagtttatttcttcagaaccagcaagagtacatctgctactccaaatgtctggactcaggaaggctaaatccctgttttaaagggctcatctgattaggtcaggcccacctaggataatccactttgattaagtcaaaatcaagtgactagggaccttaattccatctgtgaaatccctttgcctttgccatataatgtaacctaatcgctaaagtgacatcatcatattcataggtcccacctacgcttaaagggaagaaattatatagaaagtgttaaaccaggttgcaggaatcttggggaccatcttagaattctgcctaccacatttaacagctggtttgatataaagagaagacaaaaataagtcaaagtttttagcctgagtaatttagaggatagtgataatattaactgagatatgaactgagatatgacacataagaggaaaagagatttaatgagaaagattatgaatcttgcttatgagtattcatcttgcagtaacagtggtacaaccatttatcctaaaccaattccatccatttgtttcaacagtacctaatgtttaattaaatggtgtggagaagaggggtttcttacatctgaaagtaattctatcataatgtacataattatttttaaatgttacaaatggccatgaacttgagaaacaattagtaatttattatgttgtagattcatgtcttcttcctttaatccagcaaccagtcacagagatttttttttagttgttttgataaatgctcctttcaagctccgttatttctgagaaatagccaaacatctttttcctccaggaatgtttattctaaaatacacccagtaatagctgaatgagttgttaggcaagtagataagtgaaatacccaaaataaccaaggcaatattagggttagtactaatataaattagaataaataatctaaactctcattttaaactatctgaattatcccatggcttttgggttaaggcagatcacacattccatggtacacacggtaaaatgcagaacgctattattgcttggaaaagtgtagaaaataaacatttactgggtgtcttcctaatgccaagccttatgctaaaactttcacatatgctatgctatctcatttcattctaacaactctgaaatagggataatattagcctcatttttttaaatagataaggcagttgaggctgagaagttaaacattttacccaagctaagaggtaggaatggccaggtttccaacctaaatatagcttattcttcatgccttattcttttcactattattctctcttcaatcctcagattagttgtaacttcctctaagaagccttctgtaaccaccctctgggacttccaagaccatgccagatgtacattcccaccaccatgttttcccatagcaaccaattagtgtcaaagttaagtgcttgagttctaggactgcacaaacaggattcaaattccacaggccaggattcaaattccagctttacacttgctaagtttatgaacttgcaaaattgaccaagcctcaagctttttcagtaaaacaggaataaaattactacctagctcaagggatagttgagagaatgacctaagaaatacatccctattattgttataattataatcagaagatgtattctacttattacactgagttgcaattgcctgttcacttttctgtattccatactggaatgtaaaatcatccctgaaacacaggctgcatgtcgttagttgtgatttccccagagcctagcacagtgcctatctggcacatggcaagcacttgaaaacctctgctgaaggaaggaatgaagaaaggaagggagggtgggtcggaggaagatatgacacttcccattaaatggatgttcttgcttttccctggcatagtctcaacaaaggcatgagaatgcatgcagatgaaaataaaccattacttctcttgattatatttaaggatcagaaaccttagaaagtggagtttgttatgacatccttaatgccaagtatgatctagaactcctaatagttaaatggtgcctggaaaaggacaaagtccaggcaggctttcagtaagtgaacattctctctctacgagatatgagcatcacccttacccccatagcctgagaataatgtgctaaatgtgaatgacttccacataacttcaaagccacacacaggacagtccctcctcccagccaaccactaactccagggctgttatgaaaaatgcccaaggctcccatttttttttaatttatctcagctatgcctatttccactttctcatcttcagctggtaacagactttattcttctggtggaaagagcacatttagatttaactgtatattatttgcacccatttgaaaccctacatacagggagaacaaaatatccaaaaaagtgtatttaattcatatagggtcaaacagtttgggcactcataggccatgataataaaagaggattcttcatatttttcacatttcttataggcaaagtgacaggtaaaaacgcaaattaggaagaagtaaccacagagaagagagatgaatataaagacaaagaactctattcatttgtgatgcaaaaatccattattaggaacaaatcttctccgacagtcttgtggatgctgcataattcagagagcccaactgtacttaggaagtgatggttaaatattgaaaatctgattggaagacggaggtggcttcctgctctttcctgtaattgccttgtctgatttttctcatgaacaatgtatcactggaatttttgactatgatagagtgcacctcctgagagttctgccctgaaggctaggactccaactctgcaggagctatctgatggagaacttcatatatctcctctgcacctgtcattcctcttcccttgtgaagccccagggtgttgtgtggaactcaccagcctctccccagcccatctcccttcaccctaccacctcatgcagcctaatgagttggagagacacagccagcccaggcttcttattacaatcacattccattttcttcaaataaaccctgctcagaacaaaggcttctgggcacagcctttgttgtggatgtttaaatcataacattttggtgggatccagaatatcatgattattgctttcaagtaatttgtaatatacatgcttagcagatgatgtaaccgcatattgctgctgtgctttttgctccattgcttcatgcggcgtagttttctacgacagtatactccacaaatgcaaacagatgtatttcccatgaccttaaccccaacaaacaaagttgttttatgtatttcccggttcacatttttgagggcttcaaaatgcagtctcctaaggtctttcaatacttgtgcttttcatgcttttaaccattttaggtatttcaggaatgtaataacactaatgagatatcagagcaagaaaaataacaaaaagcatgtagtctccaaccctaaaaagtttattttaaacatgttggtttcctttaagctttgctttcaattaactgactaaaatgatagaaaagagctttgtgaagttaaaaatattaacaaaaagaacacccaagagaaaaacatctagagtaaggtgatttgaaatactgatgtgaaaatctaccaaaaagaattcataacacattttgagatcactgaacaacgaagtgggatttaacctaaaagagttaaaatggtatataaggtctattaaaatcatcccacctcaaatgttatagttatctcagttagccatttcttgttttgtgcttttttattttagggtttaaggagacaaaaataattttgaatagctaggagtgtcccttatttgtgcctgctgacataggcatttttctaagggatctttaccatgtggtgtagtggtttaatcacactggctttgaagtcagacaggcttgaggctagaacattttttaaaatttcttacaactgattttttaaaattataactcttactttgaaatagttttagatgcaaaagtaattccatatatagtacagagaattttcatgtacccctcattcagcctttcctaatgataatatcttgcataaccatagaacgttgtcaaaagtaagaaactgacattgttacatacaatacaataataatgtgtatcacaacagtacaatacattatttggatttcaccagattttgtgtggacttcttttgggggtatgtgcatgtgtatatcgttctatgattggtgtaaccatcaccagtcagtatacagaactgttttatcaccacaaagaaactcccttgagttacaccttaatgatcatatcctacccccaatcctaactcctggcaatcatagatctatgcagcattatgattttgccacatcaataatattatataaatggaatcatacaatatgcaaccttttgagactggcctctttcactatgcataactcttttgagatccatccaagatgttacatgaaccagttaattccatttaatttttgagcagtattctatagtatagatggcccacagtttgtttttgtattcatcagttgtaggacatttgggttgtttccagtgttgaccggtacagtataaagctgctataaacattcatgtacaggtttttgtgtgaacataacttttcatttttctaagataaacactgatgaaagagattgctgggtcctatggtgtgtgtatgtttataggaaactgccaaactattttccaaattggctatgccatttaacattcctcatcagcacttggtactatcagtaatttttattttggttattctaataggtgtggtagcacatatagctttaattcgcattttcctagaggctattttttcgtatactgatttgccaccagtatgtcatctttagaaaagtgtctgtttaagattttgaccatattctaattgcattgtttgttttcttactactgaatttagagagtcctttatatattctggatataagtcctttattaggtaagtaatttgcaagtattttctctcagtctgcagcttgttttttcatctttgtagcaggtattttacagagcaaaatactgtaattttgatgaagtttaatttaccagttttgtttccttgttaatgcagggcagagatggaagtcagggtttcacacacaggctccaccagagagggcagggcattactgcaggacaggggttcagggtagttatggactgaattatatcccccaaaattcatatgttgaagccctaaccccccatgtgattttcttgtggctttttttaaacttgactatatagatatccaaaatgaaggcaaaagaaatgaaactatcttatgaaaagtgaaaataatcatattaggaatataggatgaaatacttggaaaatattttttatctggtcttcctgccagccataggaaaaacgaaaactcattggttatctaattctcctcctttctttttgcttctttttttcctccttttctacctcctggggtactgataaaattttctatactcctttttgctctgtgaattcagaagctatggagaatattactctcattttaatggttattcttaagttttaaaatgataaaatatgtatttaaataagttttaaaaatatatactttataattttaaaactgtatccttttttcagtgtttttttttggagagtataaagtcattcagcatagtatctctatcttcctctcaaataggacaaagatgttaacacattaagtatccagtgaagactcaccttatcttctattattgtggtttagcaatttgtttcactttttaattgaaaaaaaaaaaaccttatccacttaattttttttgagtttccattcaactttttaaaaaattttttcatttccataggttattggggaacagatggtgtttggttacatgagcaagttctttagtggtgatttgtgagattttggtgcacccatcaccagagtagtatacactgaacccaatttgtactcgtttatccctcagacccttctcaccctttccccaggtccccaaattttattgtgtcaattcttatgcctttgcattctcatagcttagctgccacttatgagtgagaacatatgatgtttgcctctccattcctgagttactccaataatggtctccagtcccatccaggttgctgcagatgccattaattcattcctttttgggctgagtagtattccattttatatatatatgtatgtatatatcacagttaccacatatatatccatatatatatctagatactagatataaagatatatctagatactagatataaagatatatctagatactagatataaagatatatctagatactagatataaagatatatctagatactagatataaagatatatctagatactagatataaagatatatctagatactagatataaagatatatctagatactagatataaagatatatctagatactagatataaagatatatctagatactagatataaagatatatctagatactagatataaagatatatctagatactagatataaagatatatctagatactagatataaagatatatctagatactagatataaagatatatctagatactagatataaagatatatctagatactagatataaagatatatctagatactagatataaagatatatctagatactagatataaagatatatctagatactagatataaagatatatctagatactagatataaagatatatctagatactagatataaagatatatctagatactagatataaatatagatatatctagatactagatataaatatagatatatctagatactagatataaatatagatatatctagatactagatataaatatagatatatctagatactagatataaatatagaaatatctagatactagatataaatatagatatatctagatatatatatctcacagtttctttatctactcattgattggtgggcatttgggttggcttacatttttgcaattgtgaactgtgctgctataaacatgtgtgtgcaagtatcttttttcgtataattacttattttcctttgggtagataaccattagttatccacttaatttttaagtttctctacttggttttgtttcttgcatctcagtcttcctccttgagttcaattttcttcttgctaaagtacatcctttatagttcattccataatagtttgtgagtggaaaagtctcctaatttttgtatgtgaaaaaatgttttattttactagcagtgatcacaagttaagactggaatcaaattcatgtaacacaataggatttaatctatcattaaattattcagatttatagaagcatagaagtcaagaaaaacagccttattactacttagaggtcctaaaagtatatgtatgcacagcttcctttatctccccttacctacacagcatgtgtacagaaaatggggatgacttcaacacatatatggtttcacttagcacagagaagctactgccttagtttcccacctctcttatatattgttcctgtcatataggcccaaaacttgtaggcccacatagaataatctcagtccagatatgctctctctaatcaggaatttcagagtaaacaagacagatcattagctcttagcatgcagtattccatatttatctttttgggttttttttcttgagacgtagtttcactcttgtcacccaggttggagtacaatggtgtgatctcggctcactgcaacctctgcctcccaggttcaagggattctcctgagtagctgggtatagatgcctgccaccatgcccagcacatttttatatttttagtagagatagggtttcgcaatgttggccaggctggtctcgaactcctgacctctagtgatccacctgcctcggcctcccacagtgctcggattacagacatgagccaccgtgcctggccttccatatttatgttaactcagtaagcatccaaggaaatgatgttgtgagaaccgatgtttccttcccgggaaagccttgttatgtttaggtacctggcctgatgtaaccttttacacataggtggttttgccaggcatataattctagattgacagtggctttccctcagcaatttgtagatattgctctattggacagttgctaattggaagtcaactgtctgctagtggccatgcttttttttttttttttttttttttttttgagacggtgtttcattcttgttgcccaggctggagtgcaatggcaccatctcagctcgccacaacctcctcctcccaggttcaagcaattctcctgcctcagcctccctagtagatggaattacaggcatgtgccaccatgcccggctaattttgtatttttattttgtatttttagtagagacagggtttctccatgttggtcaggctggtctcgaacgcccgatctcaggtgatccgcccgccttgggctcccaaagtgctgggataacaggcatgagccaccgcgcccggccaaggccattctttaagaatctgatttttccttcaaatagttttttgttttgctttgtgttttattgtggtaagaacatagcatgagatctactctctcaacaaatgtttatgtacaaaacacagtactgttaactacaggcacaatgttgtacacctgatctctagaacttattcatcttgcataactaaaactttataatattttctccttatcttcaagtttactaagatgtatctaagtatgcatttattttcattcatccttcttagaacctggattacatttgtcatctgagacttgtgtcttcaacactgaaaaatgcatagccaaagtctcttcaactgttgctacttcactcttttctctcttcttctggagcttctgctatacctttcacctcctcaatcctccttccctttctctgaactgctttttcataatgtctcaggtctatttttttgatttactaattctctctttgcttttgccttttcaaaagtttatgccatgttatttctctaatttttaataagctatttttagatctgcctgttatcatatcatttttgcatggttttgttttatattttcttagtcttcattatgaatgtttttcctttttatcttatctgtgaaagatcataaatgtcttattataaagcatttttcagattgtataattattttcacttcatctgagaaggaattgatgtcaataatttatcttcacagctatttttagcatttttttcttcattaattatggaatttagattttcaggtttgtcttgggtaggcggaagctttgtcaattatttaggcttttcttcctccatctctttcctccctttctggtgggttttcaatggccctcagccaaccctgttaggatcccaaattagaaatacatcttatattgttatatcagtgttcctgcctcattgggataattgtgacattatcactcgtcactgagccagaaggcagcttcacagaagctctggcttcaaaactgtagcttcatctttacttcctttcttgatattctggtagtattagacagcagttttttgtttttgttttttttaagcttccttttatgcagtggtactccacctcagaccctgatttcaaacaatgatccaatgtctggttgccacctgcttggcacttttagatcctgtcaccttgtgagtgctgaactcctaatcatctctgcctgcctacagtgctacagcccagcagacactcatctccagccctactgctttgcatttctgttcttttctagtcaaagacatatttagtttgttccttaaagtgttattgtattttaaattttctcttttgttattttatctatagttactattatccaaagaagagggatagctcagatgttgaaactttgtcttgaacagaactatagtagttctcattacccaatataagaagcatgctacttctttagaagttttttttttctcaaagacacattaagataatggaaaaatactttgggggtgattcttcagtagtaggcatctttttatcaatcctgcacaaaatcagaaagcacaggccgggcaccagtggctcacgcctgtaatcccagcactttgggaagcccaggcaggcggatcacgaggtcaagagattgagaccatcctggccaatattgtgaaaccccatctctactaaaaatacaaaaattagctggccctggtggtgcacacctatagtcccagctactcgggacgctgaggcaggagaatcacttgaacctaggaggaggaggttgcagtgagccgagattgcgccactgcactccagtctgggtgacagtgcgagactccgtctcaaaaaaaaaaagggaaaaaaatcagaaagcacattacttaaatgttattcactgatgacatttctaatggaattagagctgtggtccaaacgaatttttaacttgtagtccaaacttagagactgaatgattagctccaaatatctctcaaatatcactctttttagctgagcttcttggatagggctgaatatcagtcagtccaagattgagctctttagaggaagtgaagacgttgtgttgattgaaaagagatccatatgctttgggcatatgttttagactgtcaggtggcaaggctgacattccgttatgaaaatttaggagcctgacttgtattctcaccccagcagaaggccttcccacctccccagtgagccataacagtgcctgtgaaaaagctaaactttttattttaaaaaagcttcaaatcttctcaaagtcttggtagaaacctcatttgaggtcttccatagcataggaggaattttctaggaaccagaaggaagataccgacaagagaaaatcttagatcaggagtatcaaaaggaaaagacacatgtgatcctgattttcctctttatttagattggtgcatattcaacaaggaccttctgtgttcccatctcatcctcagttctgaggctactaaaatgatggtcattttgttcctgtccttgaaggattagatcagaacaggacaagaggcagagagacaagccaggaaatgactagtcattatgagacataaaaagactaaactaaggcagcaagaatgtagaagagataaggatttttaaaatgtatttaagagacagaatcctgatagattgtagagtaaggaaataggaagaatttataactccaagatgacttccacatcttttgcttgtgtgacaggattgattggtggggccattcattagcacaaaggatatgggaagaagaaaaggaaaaggagcaataagataaaggtttcaggttttagacagattgaaccttgagtgttttggtaacatccaggtggaggaattcagtggaagctggatatatgctagattctaggacagaaactaggaagttatcagcatatagggatatagaataaacaaagacagaaccctagagggaagactaaaacagagttatcttttctcattccatcaaaaattattaatcagttgagataagtgaataaaaatcaaagaattagcacttttaatataatgaagccccaggatacccacctactcttctttacctttggaattggcccagcacatctcaagtactgtaaaagaaccaagcaaactgtgagaatttggatttagagctatattcatttcctggaatacacaactgctagcagaaagttcagcctgacagagaaatcacagaacctctcacagaggtttctgcctataatatcagaaggcaatgcaagtccaagttagcagtatcttctattggtggacaaagacaagatacatggatcctaatactgaattcccctaattgcctcacagaggatagtcaagaggcagcagagccctagcaatcaggcaaaagtaggaaaatagaactctaatgctccagtggggttagaagaagacccagacaggaatcaggagaccacagaaacaaagaagcaaatccatgatcagacttctagtacctagagcctggcggctgagtgtcagagaagaggcatgaagcacctgatccattatcacgttttatcatttctacctcctcaatagttctcaaatccatcacctctctgcattttcactgttgttccttcggttcaggccaccatcacctcttctctgaattactggaacagcttcttatctggtctctgtctacagttttattttcccaccctgagtccactcttgtcactacaactggagtgacctttgaaaagtataaatctgatcatatcacccacttttcattttaaaacaattccttgaatgattttatggatgagataaagaactgagaatctttttctgtaaaattccagatagtaaatatttttgactttgtaggtcataccatctctgtcataacctcaactctgccagtgtagtataatagcagtcataaacaatatataaataaaataggtgttgctgggtttcagtgaaattttatttataaaaacaagtggatttggcccctgagttagtttgctgatccccggactagaggaagaaaggaattcctctatttctgttgggccatttgtactgaaatcctaggtatcaaaccctcagagaaatttcatcattgggagtaagcagcccttgtacaactggggaggctagaagagtgtagtaagagcaagtctgggctttccacaagcatatatgctggtcctcttacatcagctgcagctgtgggtgtagaagtgcagagatgatggctggagaagaggccagtctcagggaagtgacagagccaccctcaaccctcaggagattctgtcacagttccattccatgtagaaaacaaactatctcagcctttgagcccaacaatagcagtgctgacatgaccaatggaaatgaacaaacatagtaaggggttcaggagtggcgggaataaagaaaggtagtgatgggttcatgggaggtgggaatgaacaaagataggcacagaaaagcagtgaaccacaaggagaacagagcatggacaatagcatgaaactcagagaagaagagaagaggtggagaaactcaggtaggaagagcccaagggatctattccatccccatggaaatacccagaaatagctggatgatactttgagtggggtcaactttcaagccacaataatttgtagagcaaaaggagttgtaactgtatttgttgtcacagaccgataaggcaagaggcagaagggttatatgcataacagctaaaagctcccaggaattcaggagtacattgaaatgaatttgagttttattcatcataacatctatattcatttggaaagtagtagcacatgaaaatgcagaacatgttatttactcatactaagactggtgtgcaactaggtttatgtacttatgctaattttatgtcctcctttccccacctcccacctcacttgagaggctcaaagactggtaccatttggtgtcagcaaaggtccaaagaaatgcatgttgatcctatttagaaaggaaactgctggtgagtgtgagatttagctaaataagtaaaatgctagccctcaaaggcttcagaatctggcccctgctacatgtttagcctcatcttacaccagtgtccatattgcttttcctgctcttgctctacgggtctgctctgtgttcttaggaaccaccattctctctcattccccagggtcttgcaagtgctatttcctctacttggaatactgtcttccccacccatacacccccacctgtgcctaatatacttctagatatcctgcagatcagacagttctgttttagatctcagtggccttgcaggatagtaggaaaggccctgatctataagttgaaagaactcatttctggtcctagatcagcttccatctagctgtgtacttttgggttactttaccttctctgaaaattaacttattcagaaaaacagaactaaaaatatcaagtgtacccaatccaaagagtagtaagagaattatacaagacaataggaagggctttgagtagtataaggcactatatttggaaacctccacacaggcctttctgtcgctcaacctagagcttccctgtcagtctattcttcacattctcttttcctctttactgtagttaccagaaatccaacttgctttcctatcctgcaataattttcatcactcactcaatcccttgaaatcatgttgctcaagactggctgctctccctacccacaataatatttgatgacccaaagcacacatgttgtttgactgctaattaccaccaggaaacaaaactagcaaacttggtgtcattaaacccagagctttggaaatattttatacttctcttcttcatgttttacttttcaaaataactgacacacccttggacttctgccttctagctttcttctcaaatatgaaactcaacaaaacttccttttccttctgactctgatgttacccaaatccctgagaactcttccacaggaatgctcctcttcctagactaagaatgtcacccactaagaaaggtcgtctccttgtcttaggtacagtttgtaatttggaagcctccagcttaggtgactccatggagtctcagcccatacaaaactgacctgaaagaagagagaaaatacatggcccaagtgctgccattccccatgccaataaacacacacacacacacacacacacacacacacacacacactgccaaatgaacatagtgctctttccagctgattccaactcaacctccgagttctattcaatccaacccttcagccagcttcatcaatcaagagctggcaagtaagataaagccaattagttgcaaataccattgaggtagaacctttctctaaaagttcactcttaaaggactagggtaaccttttacataaaggttgtgccagaattggaaagtgcccacaaccctgtaatttacatgtactctggctccctgcagtgatactcagttcaggttgtagactcctttaataaaatattcattaaatggaacaattctcttctgcgtaaaaatttacaggctggaatggtccttatgaggtgatttggtccttcctctgaagcagttgtgtactttattttctgcaattgttatttaggtgctagaaaccaagacttttgtttccatcttcttccttgttggttgaaccagatttcatttgggtatttatagggttttctttgctctatttgggtagcatgcccattttgactggttggtccatgctccatccattgttcagtattttgaagatcattctctagttgttcatcctccatacagctatgtgctcaaaggaaggtgctccttctcattgccaaaagtgaatggcaatttgtccaagccaaagtgacctcattccccttgccagtgattggcttatgactctgtcttctgcatacagcatatagctccatcttggccaatgatatgggaggggaagtctagtgagaaaacttctcaagtaaatgtctttcatcttaaaagagagacgcaagggacttcacaataaagttggcagatcagattaaatgattaaatacatgtatttaccactggttcctctcaaaacaccactaaaataatagtattatttcctttaaggcataaatttgtaataatgaggaaaataggaggggagagaagaccaagaaaattttacaaagtaggaagcatacagacaagtagaactgacttgcagacccaagaaagctgaatgagctgaatgtaagccctccgtggagaaagctgagaagcaactcaatttcacaagaatgcaccaaagtcagccaaaatgatgagtacagcacataggaaagatagaacggaactgtatccctgatgacatcactgagacagcctaaaaccgtgctggtctccacacttcatgttatgtgagataataaatgtccctagtttacactgctttcagatgactatttttatttcttgcagcccaaatcatctaactgatacagactctcaagttctttaagaaaaaatgggaatagggtgcatggcatgaggtctgggaagacacgaattaaagcaggtctctcattagtcacatgagcattcttgctcatttttctctctcctgcgtctatccaacctccgctttctagtcataatttcctctgcttgttaatattacctgctacttttttcatttttatttttaatttttgtgggtacatattaggtttatggggtatataatgcatatatttatggggtgcatgagatactttgatacgggcatgcaatgcgtaataatcacatcgtggaaaatggagtacccatcccctcaactatttatccattgtgttacaaacaatcagttatactcttttagttatttataaatgtacaattaaattattgactatagtcaccctgttgtgttatcaaatagtaagtaggtcttatgtcttattgtttttattttgtgtgtgtgtgtgtgtgtgtccctgctacttttctaagcaaatggctagagacaactcccctctatttcatggcttcccttcaacttcagctcccattgttaaaatacattttctcttagagtaatttactgaaaaagtaaacaggataggtgcagttcattctttaatgtcaggctacatggtgtctctgaccagttttctaattggtttcccgtcattacaattcccatccctggtccaatcagcacatgttgtgggggaaagaaaggtgtatcagggttgtggtgatataaaactacttccctagactcacccactgtgggtaggaaggcgccatttcttcttagaataggctgtcgaacagactgacttaacctcaaagaactggttactttattgaaacatcgaaaaaaggaagaatatacaaacttctttaatggcccattccttctatgttaacctcacagcaaaggcattttaaagcctaaaccacaacttcttgctacaacaattttctcttgtggcctcactgaaaatgagatacagcaacttcctacaacttcatagtatccattctggaaatattatacccttgggtaatctcatctccaggcaaaagaattccatttccttacactatcattttaaggactaaggaagaaaatatctcacttatcacatttatacaacttatctccacagaatgaatgcatagattagtttttgttcaacagtaatgaaaggcactatgcaaataccaagggcaatattttaagttatggcatttttattcacagagtatgtattgaatataatttaaggatgcaaaatcttttgtccttgcattgatcataaaatacaaggtcatttcctgtgggggggccagaaatttatgatggatgatagaataatgtattagtatacatacagatatacagtacattatagagaaatatgcctggatagaattaatgtgcctttaagtgtgcataaactttacagtagcttaatgcatatgtatccatttctagataaagctaatgtgccatttgtgtacatatgtacacacacgtacacacacagagatttaagtgtgtatgtatgtgtgtacatatgctgagagagaaaaagaaagaatgtggcatgtctttacagacataaagacttaatgtatactacagacacattcacattataatgtatctttaatacaattttttgggggggacagggtctcactctgttgcctaggctggagtgcagtggcatgatcatagctcactgtagcctcgacttccaggctcaagcaatcatctcacctccaaatagctgggactataggcatgcaccactatgccaggctaatttttgtattttttgtagagacagggtttcaccatgttgcccagactggtcttaaactcctcaagtgttccacctgtctcaccctcctaaagtgctaggactacaggcatgagccaccactattggccttttaatacatattttaatgtgcctttaattctaaccctatggcagcccagcaaaaatataaaattggcctagcaagttaggcttcttcaagtataggaattttctcattagtagcctatatgttcagtctatggtcagtaaaagctcacgtttcttgagtacttaccaaatgctagaaatggtgctacaggattttcatttcatttaaggatgaaccaaggaagatagtctctatacaaacatggtcaaatcttcttacatgttcttctcacattttgtctttcctcaccattcaagctgccatcatcccaggcagacctggtcaccttacacctgggcttggcaattgctttgttcttctatcttcttttctccagcattttcctctgccacttcttccttttctacaataaatgctttatgggatctccttccatcagcctgtgagttttgagaggcagaaattatcttcctccctacagttctccccagtttcatcacaagagacagcgttggtgggaggcccagagggaaatcactgcgagaacattacctgggcaaactaaattctacctttcccactccgtgtattcttggataaactgtggcaagcttcatcaactgggaaatggcacaggtaagcagatgacctcttaactttatatgtcaacttaactggggtaagagacgcccagatagctggcaacacattatttatgggtgtatctctgagggtgtttccagaagagattagcatctgaattggtagactaggtaaagaagatcacactcacctatgtgggtgggcattatccattccattgagggcccacataaaacaaaaaggcagaatcaggacaaattatctctttctttagctgggacatccatcttctcctgcccttggacagctccttgttctcaggccttcagactctaggactgactaacatcagccaccaccccaaccaaccaccctagttctcaggcctttggacttagactgggagttacatcatcggttctttggttcttaggcctctgtacttaaaactgaattataccactggcttttattggttctctagtcagccctctgtatctgtgggttccaaatctgtagattcaaccaattgcaaaccaaaaatattcagaaaaaaatggatggttgcatctgtactgaacatatacagacttttgtcacatcattattccctaagcaatacaatattagatagtcagtaatctagagatgacttaaagtatatgggaggattatgtgggttatatgcagattctacataatttcacataaaggacttgagcatcttcagattttggtatccactagagggtcctgaaaccaataccccacagataccaagggatgactacacacacatacatacacacacacacacacacacacacaccaccaccacatagtacatattggttctgtttctctggagaacgttggctaatacagattttggtattgagattggctctggagaaacagattttcaaaagtgagggttttttaaaaaaaaaatcattctgcagtttctgaaattggctttctaatctgacacagtttaaagatgataatgattccttttccagtagtaaagaggcaaacagttcgtggcacaaactgtagatatatacaaaatatggatattcctaatcaaacacttctaagatgcaaggagcttagtaactctgtatatattagctttgaacacttttggaaaactaaggaatatgacactgaatcactggaaaaagtagtttacaaaaaaaaaaatgagctaagggattcaaattcccacctcaagtgctacataaatgacctaagagcttataggtgtgccctgagggacagcattatctcctgcagtgcagggctaaaattgctgaaaatcaaatgtaggatctcatcctgtaattggctgaattacaacacaagtgaaactctcagcctcacaaggtatatactgtaaagtgaggacactgtgaaaaaatgggatcttgcaagttgggatgggggtatgtgggaagactctaaagaagctggggacactgagtccctaaactgtgattatctattttggcagtgaaagaagtctccccaccctcagtagagcttaggtcccacccccagagtagttggtctccctaatcccagcaaaagtggcatccctaataccagcagaaatgaccccctactcccagtgtcaacagcatccccacctccagtaggagccatctcctcattcacattggtctgagtcatttacctccatctgaagggattagccctgcattgcctgaggaatggcctcctctgaggcagctgccatgcaagacactgctgattctccacaagagctacctccaacactcctcttttcttctagacaaataactagactcaagaccctagcaggcccttaaaggggaagtacaaagtgtggcccatgaggaggcatgctatattccaaaagaactacctaacctttctaatttatacaagcagaaatctaggaaacatgtctgggaattgatattaagggtgtgggataatgaaggaaggaacataatgttggatcaggtcaaatttattgatgtgggcccactaagcagagattctgcatttaatattacagcttgggagttaaggctctaataatgtggttgattggttggctgaaacacaatcaaaagatggcccattgtaagcaaattggaaatgtcggctctccctaggtttaatgtagaggaagggattcacaggcttagggagattagaaagagtggatttataatttatgatatattccccaacactgagaagatctagaagacacacttttatcaatactttaagaaataaattactaaaggaagccccagtattcttgaagaactctgtgattactctttgtaggccagaccttatagtgggaaccacagccacttaattggaaaatctaaatgcaatgggagtaattggatccagagtggtgaggccaagtggcagcattccactgccaaaggcgaggtgggcgtagttactgtgttgggtggcagagtcaaagcagcaattagaatagtctgactcacacagatctgtggcgtgggctagttaatcatggtgttcctagaagtgaaatagatagaaagcctattaaatttttacttgatctgtataaacagaaaagttccaggtcaaatgaaccaaagtttaaattgaatcataaaattagagagtcagagcccctcaatcaattttcagacttgagccagtttacagacccagaagccctcaaatgaaaatttatactgtgaatctttctcccagctttctccgaaaggacctacagaattttagcagggtaactgtgcaccagggtaaaacatataatcagacctttgggggactactgaacactagatttgaactgacactgattccaggaaacccaaaatgtcactgtagcctctcattcagaggaggggcttatataggtcaggtgatcaatggaagttttagctcaagttcatctcacaataggtgtcagaatccatcctgtagttatttcccagttccagaagaaataattggaatgacatacttagccactggcagaatctccacattggttccttgacttgtggactgggggctatgatgaagagggccaaggagaagcagttcctagaattgcttccacctcaaaaaatagtaaataaaaagcaatactgcattcctggagggactgcagagattagtgctaccgttaaggacttgaaagatgcaggggtggcgattcccatcacattcccattcaacactcctatttggtctatgcagaagacagatggagcttggagaataacagtggattatggtaagcttaaccaagtggtgactacaattgcagctgctgtactagatttagtttcactgcttgagcaaagtaacacaccccttggtacctggtatgtagctatcatctggcagatgcccccttctccatctctgtcaataaggcccaccagaagcagttttctttcagctggcaaggccagcaatacaccttcattttcctacctcagggttatattaactctccagttatatgtcataatttagacaatgtcaagcacacagggatcttgatcaccttccccttccacaagacatcatactggttcattacgttgatgacattatgctgattggacctagtgagcaaaaagtagcaaccgctttagatttgattggtaatcatttacgtgttacagggtgggatataaatccaattaaagtttaggtgtgatctatctacctcagttaaatttctaggggtctatggtgtgggcatgttgaaatagcccttccaaggagaaggctaagttgttgcacctggcctctaaccaaaaaaaaaaaaggcacaatggctagcgggcctatgtggattttggaggcaatgcatttcttatttaagcatgttattctggcccatttaccaactgactcaaaaaaaactactagttttgagtaggtcccagaacaggaaaaggctctgcaacagatccaggagactacgtaagctgctctgccacttaggccatatgatccagcagatccaatggtacttgaggtgtcaatggcagacagggatgctgtttagatcctttggcaagctcccataggtgaattgcagtttaagccttcaggattttagagcaaagctatgccatcatctgcaggtaatgattcttcttttgagagacagctctgggcctgctactgggctttagtggaaactgaatacttgaccaggagtcaacaagttactacgcaacctgagctgcctatcatgaactgggtattatctgacccatcaaatcataaaattgggcatgcacagcaacactctatcatcaagtggaagtggtatatatgtaattgggcccaagcaagccctgaagacacaaagaagtcacatcaagtgatccatggtcctcattcctgctactgccttctcttcttccagctgcacccatggctccatggggagttccccacagtcagttgacagaggaagtgaagacttggctatggtttacagatggttctgtgtgatatacaggcactacccaagagtggacagctgtagcactataacatctctctgggacatctctgaaaggcagtgttgaagggatattctcccagtgggcagaatttcaggcagtgcacttggttgtgcactttgcttaaaaggaaaaatgtccagacatgtgattatatactgattgaagaactatagtcaatggtttggctggatggtcaggaacttggaaggtacataattagaaaattggtgacaagaaatttggggaagagatatatggatagatctctttgagcaaaaaatatgaagatatttgtagcccacaagaatgctcaccaaaaggtgacttcggccaaagggtattttaatagtcaagtgaataggatgacctgttctgtggatactaatcagcctctttcccttgctactcctgtcatcacgcagtgggctcatgaacaaagtggccatggtggcagggatggaggtcatgaatgaacttagcaacatggacttccgctcacctaggctgaccttgttatggccagtgctaagtgcctaatgtgtcagcagcagggaccaacacagagcctccagtatggcaccattctccagggtaattagccagctacctggtggcagattcattacactgaccacttctaccatggaaggagcagcattttgtccttactggaatagacaacagtgcatatggattttccttccctgcacacaaaactactgtccatggatttacaaaatgccttatccaccatcatggtattctaccaggcattacttctgatcacagcaaaagaattgcagcaatgggcccacactcagggaattcactggtgttaccttgttccctaccatcctgaagcagctgtcttgataaaatggtggaatggccttttgagactcacgttacagctccagctaggtgcagtgcttgggcatggtcctccataaggctccatatactttgaatcagcaaccaatatatggtgctgtttctcccatagccagaatcacaggtccaggaatcaaggggtgaacatggttgtggcaacattcactattatccctggagacacactggcaaaatttttgcttcttgtttccatgactttatgctctactggcctagaggtcatagttctagagggaagactgcttccaccaggagatacaacaatgactccattgaactggaagttaagactgccacccaaccatgttgggctcctaatgcctctatgtcaataagcaaagaagggagttacagtgttggctggagtgattgatccaaaccaccaaaattgaactactcctaaacaatggaggtaaagaagagtatgtgtggaatacagatttcttaaagagtttctgagtattgccatgtcctgtgattaaggtcaataggaactacaacaacccagtccaggcaaaactatgaatggcccagacccttcaagaataaaggtttgggtcacctttatcctgtggtaaagaaccacaaccagctgaggtgcttgctgaaagcagtgagaatacagaatggtagtagaagaaggtccttataaatatcagcttacaaccatgtaaccagttacagaaatgagaactgtaattgtcctgcatatattctccttctgttataaatatatttgtgcatgtgtgtatgtgtaaagaaaatatctttgtattctttcctattcccttatcatagtaacaaaagatatattgactttacatccatatttaaatggtgttaattttacatcatagtatttaagttacaggattccaggagaagagaaaacatcactcaagaattttacctcctctttgagggaagggattagtgtgtttttggttgtacacaggttagttgtatgatgttacatgggattttgaccttgttattgtatttacttggagattaagtatggtttaaagagatatgcataagtgcggacttgacaaggggttagtgaacttgtgatgattaattttatgtgttaacttgattgggctaaaggatgccaagatagttggtaaaacattatttctgggtgtgtctgtgagagtgtttccagaagagattagcatttgaattgatagggtaagaataatcactttcactaattcttacctcacaggataagaataatcacccccattaaggttcccaatctgttgagggcacacatagaactaaaaggtggagaaaggaagaatttgccctcttcttgagctgggatatccattttctcctgcccttcgacatcagagcgcctggttctcaggtcttcagactccaggactagcatcagccacctcatcctggttctcaggcctttggacatggaccaaactgcaccactggcgtttctggttctccagtttgcaaagaaacaatcatggatcttctgggcctccaattagttctggttctctggagaatcctgactaatacaatcaccaaggctcatcttcagccatcgatttttccctttccgaagttcaaccagtctccactattagagatgacagtgatgtgggaggtgaggcttcagaatgactcctccagctgtcaccagaggcccagctccttctaggtgcatctttcccttggaaagaggtgtcataggggctttctggttcagttcagtttgggaacaaacctatcaaaacaccaaaacaactaggaaatatactcaaggaatgagacttttttttttccttttagtccatgaagttactaggatcaaccacacctcacctactctttcacaagggataatgatatatcttcaaacagtgtagtcttgaattcatctcatctttagcttcttggttgatctgaactcccatcaacttgaaggagaagtgagtctgctcacttttgtggtttacatcgaatgcccaattaattaatattattgtgttctccaggtctaacaacacatgttgaaagacacttttttggaaaatgtaaatgttattccaccatgtcacaacagtccagttcttccacatgatacttaaattaaacattttaaaacagaatatataaatttgccagcccacctccttgcctatttcaccaattctttaattacagagattgatttaacttcaggagatggaggtttgaaaggagggaaaaaaacgaactgcacagctcatagcagctgttcctcattataacacattaaagaagaaagcaacctattagttcagaacaactgcaaaaaccaatcacagagcataaaatttcatcttcctctacctttgtcaaattaagccagttgttccagactccacttcctaaatcaaagtcatacattgaagaaggacttacctatggttactttcacacaaaaatcaacagtgtttttataagcctattttatttatggaatctattcacacaggtagcatatgcaaaatggtgtcagttactttaaacatatgaagtgggcagctccacagagtagtattttaatataaatctttagagttctataactgcttttaatttaatagcatttttctctttataaaaataattcatgcttagtatagaaaatctgaaaaataatatgaggcctaaggaagagtataaaaatcatcacatttctcatgctatttctttataatgcatattactattttggaatatattcatttggtcttttttctattcaaatggatttttttcaaagaagtatatctccccatacttgaataatatctttcttttctctttatgaattgcatgcatgttatatgcattaaattcttctcttacattatttttaatggctagaaagtagacctctaaatggatgtaccatgcttgaaagaaaaatctcttcttattgcacatttataatgcgtctgatttttattattaaaagtattattgtaatgactcaagattgatacatttttgcatgcatccatgaccatttcctcctgctctattacccaggatggatatgctgggtcagagtttacaaagttttaatactcccaaagttattcacagaagattcattaagtcaagaattttgttataagagctaaaaatgttgtgccaacttgaattttatttttattattattttttgagatggagtctcactctgtcacccaggctggagtgcagtggtaggatctcagctcactgcaacctctgcttcccaggttcaggtgattcccatgcctcagtctccgaagtagctgggattacaggcatgcgtcaccaagcctggctgatttttgtatttttagtagagatggtgttttaccatgttggccaggctggtctcgaactcctgacctaaagtgatctgcccacctcggcctcccaaagtgctgggattacaggcatgagccaccatgcccggcctggttttttaaaatcttaaatttttatagcgtaaactgaagacaattacttctagagagtctaacttaaatgctctggaatgagacccaggccaggcacatactttttttgtttttgtttttgtttttgtttgtttgttttaagtttactgctgattttgcatgcagccggggtttaagaccactgggccttgttagtgagttttctggtctaccctggaattttacttccagggaagaggtaactgaattacaagcccataaaaaaatttttttaatgactggaggagaaatttttctgagaggtgcaactgtgagtcctcataaatgaattttatagaatatcttttgcccatatgtatctgtgtataggcataaatatactaaatatctaagttgcagcaatgattgatgaaaggaatataaacagcaccccctgtgccattgcctctttactttggaatccaagagtaaatctacaataaacaaacaagttagacattttttcacctatgttttcatctttattttaaaataactttgtaaaggaatggataaaataagaagcattggaaacatggtatccagcagcataaattcccaggggcaggaagatgtgattctactacttcctctttctaagcttcagtaatctctcagaacattataatcccctcatcctcctaaagaaacctgatcagcagtttgctcatgctgctctctgtttccaggtcccttttgcaacagcaactgccatctcctctcctcacacagacacagtcagctgtgtacattgatgccacttgacaaataatgcctccactcccacccaccagccccctggtgtagtgtgcctatccatttatatctttagtagtgcttcatcatttatcccatttgagctcaggctttgcattcaactctaaatatctctgcaattcccatcgaggggcctagtcatgccagctgaagccacacaaagatcaatttacaaaagacaggaactatttctgtctgaaaatgttggcttgccgtgtccttggccatttcctaaagaatagaaccacatttctaattaatcataaaattaaaatctaatatgaagtattttgtttaataagtctggcactgcactaggtatattgtatatcttttgtactcacaaggaacccattttacagagggggaaactgagtcttaaagaggtcaagatacttttttaaggttacacaccccataagtaactgaatgaactcaagcagacatccacccaccgaacctgagcatgaacatgcttattcactgtgcttctaaacttagtcttgctttaaaggccatccactcttcctctccaattcatcttggaggcaaactccagccatattgtcctattccatgttccctcaaaacactaactggaagtatggtaaagaaactgcctgtctcattagagcaaaccaagaatcctttagagttttagcaaagaattctagaagaataatccccaggtagggagagagtcaaatatctgttaatatgtacctatctaccccaatatttttctgccaaaggtcttgttttgttttcaaaaggcaatctatttcctaatacctcttcttcctttacacaaccatttgcaatcataccctctgcacactgaatttgttgccagctactgcctaggtaggtactttctcttttctcataaatatctgattcaaggccaggtgcggtggctcatgcctgtaatcccaacactttgggaagctgaggtgggcagatcacttgaggtcaggagttcgagaccagcctcgccaacatggtgaaactcagtctctactataaatacaaaaactagctgggcatggtggcgcatgcctgtaatcccagctactcaggaggctgaggcacaaggatcacttgaacccgggaagcagaggtttcagtgagctgagatcttaccactgcactccagcctgggtgacagagcaagactctgtctcaaaaaaaaaaaaaaaaaaatctgattcaacaaactacatgaatacatttagaaatggactagccatgtagttatgagtatcttctgcatgtgtactatatttgtggtggagagtagcttatgtaaagggaaaaattggggaactagcaaaatatggcaatgggagaggagggaggcagattaagcatgtccttgggccaagttatttccttcctaagtctcagcttctttatctttaaaatgagaaggttgggttaaataaattcagttcttatttcttgtacatgtttgtatacctttcaccatctgcaacactgtaggtactcagctagtgttgaactgacttattaattttgagtactaccaaaaaaaaaaaaagattatgtctaaagcttaagtccaggccactattacttggctttaagttttgccagaaatgcaaaatttcactaaaattcttacttagcttggcctaatgatttgacataagagtaatcttcccaccaaaactttattcaagaatccaaatacaggtaagccaaagctttatgagggcacttccttacctctcatgtatttctaaagctatgtccctaagattcttgcccccacatcaaccctaaaagtgcttttgcaacattaccgatgaccttctagagcaggggtccccaaccactgggacactgacagatactggtccatggcctgttaaaaattgagatgcacagcatgaggtgagcagtgggccagcgagcattactgcctgagctctgcctcctgtcagatcagctgggcattagattctcataggagtgtgaactctattgtgaaatgtgcatgtgggagatctaggttgtccattccttctgagaatctaaataatgcctgatgatctgaggcagaacagtttcatccccaaaccatcccatcccctcacctccatgaaaaaattatattccacaaaaccggtccttggtgccaaaaaggttgagaactgctgttctattggacaaacacactgagacttttcaaacctcatcttactcaacttctccatgccattggagagtgctgcctcttctttctcaactttcttggcctctgatatgtgtccccatccaaatctcatcttgaattatagttcctataatccccacgtctggtgggaggggcccggttggaggtaatttagtcataggggcagcttctccatggtattctcctgaaagtaagttctcaggagatctgatggttttataagggtatcccccattgcttggctctcattcttctccttcctgctaccatgtgaagaaggatgtgtttgcttccttttctgctatgattgtaagtttccacaggcctccccagccctgtggaactgtgagtcaattaaacctctttcctttataatttacccagtctcgggtagttcttcatagcagtgtgagaatgaactattatagcctccatggcctttttcttttcttcaatgccctgtttctcctcctacactcatgagttcctttatgagttccttttctcattttccctcaaatattagtatccttgagttctattctcagttttttttctcgccctatgtattctctttcatctacatctacatctcttactttctaaataaaattccccacccttacttgaattttagatacatctataacaaatatctctaccagaaatattccacatataccttaatgcataaatcatcccacaaaatcattatatttcacccaaagtttttccaacttcattagtgtgtataagtatataaactaatcaactttctttctccctctttctctctctgtctctctgctggtgatagatgaatacagacaacccagggagcaaatgaaaccaaaatttggaaagtctgattttaagacacaaatcaagttcttcagcaccaaaagttcaagtaaatattttatttttagattaccatacaatgtaactgatgtttttgtgtccagttttagagtttaacacatatataggtttctgtaactacctccacaataatgatacagaagagttccatataaccaaaagataaattctcttgttatcccttttgtagtcatatcctctctctattcctaatccctggaaatgactgatcttttccctatcattacagttctgtcttttagaaaatggcatatgaatggaactaattatacgtatgcagcctcatgaaactggcttcttccaactactataatacctttcagaatcatccaagttgttttgtaaacaaatagtttgttccttttattgctgagtagtattccgttggataaatgtaacagagattgtttatacattcacttgttgaaagacatttaggtatttccattttgggtgattatgaatagagctgctataaacattcatgtacaggtttttgtgtgaacatgttttcatttatttaaggcaagtacctagaaatgggactgctgggtcatatggaaagtgtttgtttagttttacaagagactgccaaactgttatccagagtggctgtttttcattttgctaccagcaatgtatacaagttccagttgctccacatccctaccagcccttgtcaatatttttttatttcagctattctaatagatgtgccatggtacctcatggtggttttaactttcattttctgaatagcaaattaacatttgttaatttgcttatttgcattccttttgcccaaattgtttgtcatattttagttcctttgtctttcacataacctatttttattttctacttttcaacagttttattgaactatcactgacatgaaaaaatagcatatatttaaggtatacaacttgatgttctgatatatgtatacattgcgaaataatgaccacattccccataatgaacacatctattacctctacagttactatttgtgtatgtgtatagtgaggagatttaagatctatcttcttagcagattgcaagtatacaatacagtatttttaactattgtccctatgctatacggtcttttcatataaattccagaatcagctttatatacctacaaaaagtcctgttgggattttgatttgaattgagttgaatctatgaatcaatttgaggagaactaaatctttactatattgagacttctagttgatgaacgcagtactttctttaatgtgggtagtttattttcttatggttgggttatgagagtttttttgtgttccagatacaagtcctttattggatatgtgatttgcaaatattttatcccagtctgtagcctgtcttttcattcttatacagtgtctttgatagagcaaaagttttcattttgttgaaatccaatacataaatcttttctttcatgattgtgctcttggtatcatgtctaataactctttgtctaactctgggccagtttttctcctaaattttttcctttaaatttgtataattttgtattttacatgtaaatcttttagttaattcttatgtaagatttgaaattaagatgaaggttcatttttttgcccatgattgtctggctgttccaacaccatttgttgaatggctatcattcctttatgaaattgcttttgcaactttctgaaaaataactagaatatatttgtgtgggtctgcttctggcttctctgttccactgatctatgtctatccttttgccaatatcacactgaattgattgctacagctttatattaaatcttaaaatctgatagtgtgatttctccaactttactagtctgcttcaaaattgttttggttattacagttcccttgactttccatataaattttagaatcagcttgtctggatctgtaaaaatactcctgaggtttgcttggaattgcattaaatctatagatcaatttgtgcagagttacatattttcttttctttctttttttttttttgagactgagtttcgctcttgttgtccaggctggagtgaaatggcacagtctcagctcactgcaacctctgcctcccgggttcaagtgattctcctgcctcagcctccgtagctgggattacaggcatgagccaccatgcctggctaattttgtatttttagtagagacagggtttctctatgttggtcagggtggtctcgaactcccgagctcaggtgatccatccgcctcagcctcccaaagtgctgggattacaggcatgagccactgcgcccagctgagttacattttttctatgttaattctttcaatccataaaactgtgtatctctccatttatttaggtcttttttgctttatttcactaagtttttgtaattttcagcatacagaccctgttcatgctttgtttcacttacacctatgtgtttcattttttggagctaatgtaaattttttaaaaatgtttagttgccaattattcattgctagtataaagaaatacatttgattcttgtgtgttgaaccctgtaccctgtaatctcattaaactcactttttagtacttggaatttgcttatgaattccttgaaatttttggcatagacaatcatatcatctgaaaatctgcatgccttttatttaatttcctaactttattaactggatagggcacccagtaaaatgtttgttgaatgatgggagtagatatctgtattagtctgttctcatgctgctaataaaaacatacccaagactgggtaatttataaaggaaagaagtttaattgactcacagttctgcagggctgaggaggcctcaggaaatttacaatcatggcacaaggggaagcaaacacatccttcttcatacaagggcaggaaggagaagtgctgagcaaaagggaaaaaatcgccatataaaaccatcagatctcatgagaactcactccctatcacaagaacaacatgagggtaaacacctccatgattaaattacctcccactgggtccctcccatgatacatggggattatgggaactacaattcaaggtgagatttaggtggggacacagagacaaaaagtatcaatatccttgccttattcctaaattgagggaaaaagcattcatctttcaccattaagtataatgttagcttttctgtatgccttttattaggttgagaaagtttttatttctagtttgcagagagtctttatcacgaatgaatgttgaattttgtcaaatacttttcctgcaacaattgatatgatcatgtgatttttcttctttagactgttaatatggtgtactacaatgaaaaattttccagtattgagccagtcttatattccccctacaatctctacttggtcatggtgtattattattgtttttatatgtttaagaattcagctggttaatattttactgaagatttttacatttatgttaattaggtatatttggttgtgtttaaaagatttttttcttacgctgtcttttgcatcagggtaatgctggcctcataaattgagagtgttctcttcttatttctggaagagattgtatggaattggtattaattttccacaaataattggtagaatttgccagtgtaaccatctgagctagaaggttgcttttttggaaacttttaactgaaagttcagttcactaatataattttaatttaatttcatctaggttttcaaatctatgtctatagagttgttcttagtattcctttattatctgtttagtgtttatgggatctgtaatgataccccctctttcattcttgatattaataatttatggcttatctctttttttggtcagttttgctaatgtcattaatgtcaaaaaatcagcttttgtttttatttatttttttctattgtttttctggttttaatttaattgctctctgctcttgtctttgttatattcttccatctgcttgtttgggtttattttagttttatttttctagttgtttaaagtgaagggtttgaggactttcttcttttctcaggtaaccatttaatgttatcaatttttttaatttttgcaaaaaactttgtgtggtagaaaaaatactcagacctgtgagttaagggtgcaacagatttacatttgcatgtaagataagatatgtgcgacataatgaacccatgaacttatttgagagacggggataaaatgatcccaaatgtgaaagctctagacagcctagtgcagaattaatcacagagtgataataggcaagagttttcagaaagcaaagaacaggcaacacattctctgtacagggtgggaagctcttccgcaaggctctagacctcttctactaaaaggcatctgatggtcctgtgtacactagcattctttagtcctacctgctccgactttcatgtttcttctactaggaaatactgataaagattgtcagtgtgttgatggtatactttttacaatatactcatttgtacccaacgtgattcactcaataaatgttttttgtggttgctatcatctttgttttttaaaaagttattatttctaattattatggaaatatagtagttgtacatactcaataaataataaatatttatgatgtccttgaggccactaaataattattttaagtcccgtattttaatgaatttatagttcccttaggtagaagcacaatatacacaaatgaaatctatattaatctctaatagctatcctttaatttaaatatactatgcaccagacgttgtatatgctgggtatgttacatacatttaatctttaccacctttttgcaaggcataaataatagggaggatagtttcgtagaaagaaagccaaccaaccagaaaaagcccaggaccagattcacagccaaattctaccagatgtatgaagaagaactggtaccattcctactgaaactattccaaaaaattgaggaggagggactcctctctaagtgaagtcagtatcatcctgatacccaaacctggcagagacacaactaaaaaggaaaacttcaggccaatatccttaatggaaatagatgcaaaaatcctcaacaaaatactggcaaagcaaacccagcaacacatcaaaaagctaatccaccacaatcaagtaggccttatctctgggatgcaaggttggttcaacatatgcaaatcaataaatgtgatccactatataaacagaactaaaaacagaaaccacatgatcgtctcaataaatacagaaaaggctttcaataaaattcaacatctcttcatgttataatccctcaacaaattaagcattggaggaacatacataaaaatagtaagagtcagctatgaaaaatccaagccaatatcatactgaataggcaaaagctggaagcaaaccccctgaaaatttgaacaagacaaggatgccctctctcattactcctattcaacatagtagtggaagtcctaaccagaacaatcaggcaacagaaagaaataaaaggaatccaggtcaggcgcagtggctcacaaatgtaatcccaacactttgggaggccgagatgggtggatcacttgaggtcaggagctcgagaccagcctgaccaacatggtgaaacccaatccctactaaaaatttacaaaattagctgggcctggtggtacatgcctgtaatctcagctacttgggaggctgaggcaggagaatcgcttgtagctgggaggtgggggttacagtgagctgagattgcaccactgcacttcagcctgggcaacaagagtgaaactcttttaaaaaaaaaaaaaaagaaagaaagaaagaaggcatccaaatagaaagagaggaagtcaaactatttctgtttgcagacaatatgattctatacctagaaaacctcatagtctctgcccaaaagctcctagatctgataaacaacttcagcaaagtttcaggatacaaaatcaatgtacaaaaatcagtagcattcctatacaccaagaaaatctaaactgaaagccaaatgaagaatgcagttccattcacaacaggcataaaaagaataaacacctaggaatacagctaaccagggaggtgaaagatctctacaaggagaactacaaaacactgctcaaagaaatgagagcttattcaaataaatggaaaaacattccatgcttatggataggaagaatcaatatcataaaaatggccatgctgcccgaagcaatttatagattcaatgctattcctataaactaccaatgacattcttcacagaatgagaaaaactattctaaaatccatacggaaccaaaaaggagcccaaataaccaaagcaatcctaagcaaaaagaacaaaacaacaagcatcacactacgtaacttcaaattatactacaagcctacagtaaccaaaatagcatggtactggtacaaaaacagacatatagacaaatggaacggaatagagaacccataaactatgccacacacctagaactatctgatctttgacaaaatcaacaaaaacaagtaatgaggaaaggactccctattcagtaaatggtgctgtgataactggctagtcacatgcagaagtttgaaattagaccccttccttacaccatacacaaaaactcaagacggattaaagacttaaatgtaaaactcaaaactataaaaaccctggaagataacctaggcaacactattctggacataggagcagacaaagatttcatgatgaaaatgccaaaagcaataacaatgaaagcaaaaattgacaaatggaacctaattaaactaaaaactttctgcacagcaaaagaaactatcaacagagtaaacagacaacctacagaatgggagaaaatatttacaaactatgcatctgacaataaagtccagaatctataaggaactcaaacaaatttacaagcaaaaaacaaccccacaaacaaaaagcccacagagtgggcaaagaacacgaatagacacttttcaaaagaagacataaatgcagtcaacaagcacgtgaaaaaaggctcaacatcactaatcattagagaaatgcaattcaaaaccacagtgagataccatctcacccagtcagaatggctatgattaaaaagtcaaaaaataacagatgctgacgaggttgtaaagagaagggaatgcttatacactgccggtgggaatgtaaattagttcagccatatggaaagcagtttggcaatttctcaaagaacttaaaacaaaattaccacttgacccagcaaatcccattattaattatatacctgaaggaatgtaaattgttctaccataaagacacatgcatgtatatgttcattgtggcactattcacaatagcaaagacatggaataaacctaaatgcccagcaatagtagaatggataaagaaaatatggtacatatataccatggaatactatgtagccataaaaagaacaatatcttgtcttttatagtgtaatatggatggagctggaggcctttatcataagcaaactaacacaagaacagaaaatcaaatagcatgttctcacttctaagtgggagctgaacacttgagtatatatagacacaaaaaaggcaacaacagacactggggcctacttgagggtagagagtgggaagcgggtaagaataaaaaactacctatttggtgctatgcttgatgacaaaataatctgcacgccaaatccctgtgacatgcaatttacctatataacaaacctgcacatgtacccctgaacctaaaataaaagtgaaaaaaaaagaatatgaattttggagtcagagaccaagtttgaatctctgctgtctcactagctgcatgacttaggccagttgtgtaaactctctaaactttaggttttataattttaaagtgtggataaaagctgttgtgaagattaaaagcaatgatatatgaaaaaggtctggtagggtagggaaactagggattttgaagtctatacaggaatacttcacttcaaactcagcatcacccatgttagctatgagatcttcagccagatacctaacatcttgagttttaatacctcatatataaaacatctgattagatagatagatagatagatagatagacacagacaggtaagtatgtagacagctagacagatacatagatagataagtagataaatagctagagaaagagaaagagacagatagatcatcttcccctttacctcaaaacctcttctttaggaatccctttctcaattactggcaactccatccatccactgagctattcagatcaaacaacttgggataatttttcactctttcccatgattcatgatcaatctgagggttaattctattagttctatcttcaacatctattcagattctttaacatacactacttcctcttctatcatcatggtctgagacacctgtcttattaccataatttcctaactgattttcttgtttccctctttaccttcccacccaccatttttatcctggcagcaaaaataaccctttcaaccttaaatcaaatcaaattcttcaatggtttcccatctcagtcagagtaaaggctggtctttacaatgacaggtccctccaaagctctcccaacactgccactcagctgtccagccactcccgtgatctcttatcctacactctaacctgcactgctccactccaggccaactgcctgcgtcatcctggaaactcctgaatttctgtctcacctcagagactttacacttcctattcctcccacctggaatattcttcacccaaatagcttcaagactctcagcctcacctccaagtctttgctcaagtttcatcttcacagcgaggccttccctgtctactccattttaaaatccaatagcccactccatccagcactctctattcccttactctaacttatttttctctacagcattgatcatgatctaacactattatattgtacttacttttttgttttttgtctgtttcctcattacatgcatgcacacacacacacacacacataaacacgcaagagtggaaactctgagagcaagtattttgggcagttttgttcatttttgtatcccaacaccttaaatagtatcaagaacttagtattatctctctctcacccttccttttgttcctctctcctcccttcccctcctctccattcccttttcctccccgctcctttctttctctaaaatatatatgtgtatatatcatggcaaaatttatttgttcatggaaccctagagaaagtggtatacaaagcaaatcttagtttccttagcttgttagaaacaacctctttcattgggaaagaatgtacaatttatggtacatttaacatttatgtactagaacctactgtgcaccaggtactattttatttaggataaataagaaataatctctgttctcaatgcactgtccagtttaagaaagaaacaaatagacacatatgaaataaaagaaaggtgctcaaaaaacaatattttacttagtgagaaggcaattatgagaggtttaaaaataggtctgatgtggttgagacaaatctggcaataacaatcaattacagagaagactaatggcacggtgtgagtttggtgcagaagtttcctcatttgatcaacctagggggttgctcaaaatgatccaagtgttcctttgacaatgagtcatccataatttcatgattgcttttgctgtgtttgtggttatgaaatgatcctcacaccaccattcctaatattagaaggttctgttctaaccagtgcaaattgtcaggcaagagagtgggtgtttatagtatgggttaatttgttctccagcaggcctgagttccagtgaactcagcatttgctgcataagaaacgcatactagaaccttccttaatttgctgaatgggaataaacaagaggtgcttgggggcacattcaggggagctcaaagagctagaaaggagcaatggggagggtgagtagtaatagctaaagtgtccttgtattctgaaaacgaaattgcccttctgagtatgcatttagcaaactggcagattcataactccaaggttcagagggctgaacatgccaatagcaacagcaaaaagaagccttaacgacattcctttaatttccaaaccttatttcattagtggaaacttttggagctctgtttcatgccctacaagtctaactctgtgtaaggttgagggtggaaactttgaacacaaagggaacatctagggggaaacacacacacacgcacacacacacacacacacaatcttaatggagttctttggaaaacagcaggaatagctggtgcttggttattccacctgcaatatcccatctaaccctcatggcctccctgagaggtatgtactgctcattttcctcattttatgaaataaaaaactgaggctcagagagatgaagtgacattcccaagaggcagagccaggacttgaatcctggtcttcttactccagacatgtgacaattctacacttgtcttttccttcttgctgtgctgaaattctgaaaaacagagtttgtaaagctctagtctatagcagtgtttctcaaccttagttccacattggaatcacctggagatacttacaaaccctctgatgcctgggtcccagcactagaaattctaacttaatttgtctggaatacaatctgggaaatgttttttgttgttgctgttgtttgttttttaaacagagtctcactctgtcacccaggctgaagtgcagcagcatgatcacagctcactgcagcctcaacctcctgggctcaagtgattctccagtgggattttctaaagcccctccctgccaggtaattctaatatttagtcaaaattgagaacaactatgaagaaattattttaaatgacagattccctgagccccatcccaggtgtattgaattagagccccagaggcaagttggcataattgtgttattttataatcctcccatgccattctagtaagcagccaagtttgggaaccactcactggtctactctatgaccttcagagctgctcaaggtgagtaattactgaagaaccagttattagtccgacctctgtccctgtccatgttatcatggggaactgagttatcttcacagcatctgcgtttcttaatcttaaaatgaggcgattggtatttgtcctgtcaatctctttggaatgttcaagagaaaagggacaaatatgaaagtgttttaaaaggtatgttaacttctaaggtattattattattattgaactggtgttcctgatttttatctctaaaattgcctcctgaatagaccatgtccataggagaagggttctagtcttggcttctgattcacatattatcctctttataactcacaagaaggtagtctattggctgagaagaaaagtagctgcagatgctctttcccatcagaggaaaaaaatacacagaggaagcctgccccagtgaggggaaatggaaagagatgagaattgtataacttcaaccacaagcatttgttgtcaaagacacaaattcaaccaaaggactgaaacattagccaatatgctttcccagcactcaaattcaattcagaaatgagacttcccattaccaatatcatcccatcccatcgggagcatgcagcttcttcatctgggttttctgtgtctaaatctataatggaaatattaggagtgacttgggagtggggagaagctacacgaagaaatagagcacaatgcacagatgctttctcagtttagatccaactcttgacttctaataggtcactactgttcaaatttttaggaggaagacacaaaaggactgatgattgtctagaaggtttaacccttttaagcctgaagaagactttgagagacactaatgcttggggtccactcccagacattctgacttaaatgttctcaggtgacagcatgtgtttttttaaaaccttccatggagattctaatggttcatcagtgctgagattacaaggagagaaggatgacagaataaaaagggccatgtctttatccccaggcctttaccttcccctgggggttcttctgtggtctaaccaccaatccaccaccattctaaccttaatggagtatctaaccttctgtaaagctcctgaccaagtgtctcagggatgggagtgactctgccataattttttttgaagacttgattaaattctgagggaaaagcaagttaaaatgaacaagaaaatacaagaaattgatatagttataaatacagatttttggccaaagtttctgtcacatacagcacttgctagcagcctattctcaagaaaaatcctgatgaaaacaattacccactatgccaccattaccacgagggtgtttctagcacgtaaacaggtatttcagcacacatatacacattcacacacaaacaacactgggttatgtaaatatagatatgagacaaggtttttcctcaaattatccctcagaaaagaaagaattgtcatatattccagttcttatagcagctcctgtattactgggctctcttataattgctttatcaaccacgtattatttagggcgaacatattaaccaaataaatgctagttttggtgtcaaattagtagaggttacctgacaaaaagtattaaatggaaggccagtaaatttaactaaaattcacaattatttctgaaattacaacctcacaattttacttgcttttttttttaaaaaaaaaaccttttaaagatcatttattataacaattataaaaatacactaggatgaattttttaattcaggtattatacaaacggatacttataactagaaataaaatctactgtggcaaatcatacacatttaaaaaccgctgtgactcaaaccagtgagccagtaagtgctccagaaaattacatgactccaaaggtggtgctaataaggaggaaaacactgatgtctttctcataaaatttaagtggaaaaaagacataaaatttgagttaaaagccatatttctaaacatatttttctataatatgaaatcatgaatacctatattcatctaaatttatatattacatatcaactttttaaaatttcatggagaaaatggagaaatcacttatgattaggtataaatagaagaagggttgattctcacagtatttttcagagccttaaatatacttacatgcactgtggctccgtgaagtggaaaagggatatatatggtatatttctcattcttatttgatccattgagacaagaatcctacagaacatatattgggaaatactgctctgacccaaaatgacccgatcaacctcaaaaatgcctctcacaggttcctttcctttgacatccaagcagaatgcctctttgtgtgggtgccatcctacagtccaccacactgaaacccaaaaatcacacactgagcaatgggaggtcaagtggcacttgccatttgccaggcacacgataatgagtaataatatgaattgtaattacaatgaattgagcatccctggggctgtgatactgataacaaaatgaataataataactgccaatgatactaatgaacacatgtggagtacatactatgtggtaggctccttactaatttcttaacatttaattttccctacagtgatccccacaagattggtagttataaccatttcataactaactaaactgggagtcacagtcaaaataatttgcccaaattgcataactagtaagtgatcaatagcaattacttaaccatctatgacattgcatttctcaatctttaattccttgcaatttattctcaaattgtttaggagcaaaagtagtctaccttcatattgcagagttatattttgaactcaaaatggttggcttttatacagtagctccagctggtggcagacagaaggaaataaaatgcattagtaaaaggcctacctgatattaacccagaactttgaaagaagttcaacaattgactagaaatgttttgttttcatattttttaaaagatacttgttctattgtatttttacaatacaatatctatctgtcaaggtagggggaagtaactacaatttaggaaagataaaatgtttcaaaaatgtaaatgccatagaccaaaacacatagtgaattagattttttataggggtatagcacaggtatctttaagctctgatgatgtaacttgctccctttaaatatttttttacttgtgaaaaaaatgtagatcatattatataatatagagctgctatgaggattatgtaaaatgatatgtgtaaagagcctcgcatgagacccagcatgtagtgaacattcaattaatattagttccttttgctttttcctatgtaaagatgggcttcacctaacattctgattctacaaaagtggcttaaccattctttggagacaaagatagcagctttttgcagacagcttaaaaccctcagaaacccagggtgaacaccaaccaaaaataaaataagttaaaataagttaaagccagtgtgaaaattgtaaacatagactgagttattttctttacaaagcctgtagaaaatatgttaaatgcggaaatgaaaaagaagatgagaagctgtcacaactcagacaacttctgtggagtctctgtccctcaatgtgtccatcttccttacaggtacaaaaataatgaaaacaaagaatatagtaaagggctcagagctcttcctctcaacactcattattctgacatgaaagcagctatttgtaaagtaatgcctagaattcccgttgctttataattagaatgaataacattctgttatcctccttttattgaaaatcaaggggaaatcaaattttgagcagcagctattaggatggaaatgcttaatctccaaaggatttataatatcgtctcttatttcacagtactggcagctgaaggcaacctatatccaaattaaaagaagacaaacaacatacataataatcggatgaactacccaacaaagaaaatgttctcacattggttcatttctaatcattttcttgaggctttgaaatggtcctcaacttaccagaaacagcaagccttccacatttggaacacgacaaggtaagctagactacgtagctagctaacgaagaatagttaagtaaatgatactgacaatagcttgcatttgtagaaataaagcactttcctatcccattatctcatttgatcctcaatagctgtgtgacactggcaaggcaggtgtttcttattatctccattttactcctgaggaaactgaggctcagcaggttatacagtagatagtaaagctagaagtaggaatgagaataggatgggaaaggggaaatgttgactctctcaatgggaaggaaaggatgggcaacaatgatatcagaatgccaagatggggacggggcagtatataataaatgcaattttctggtcagctgtggtggctcacgcctgtaatcccagcactttgggaggccggggcaggtggatcacttgaggtcaggagttccagaccagcccggccaacatggtgaaaacccgtctttactaaaaatacaaaaaaattagccaggcatggtggcaggccccctgtagtcccagctacttgggagactgaggcaggagaattgcttgaacccaggaggcagaggttgcagtgagctgaaatcatgccactgccactccagcctgggcaacagagcaagactccatctcaaaaacaaataaataaataaatgcaattttttagcagagcaggagtagataagacagcagtgaccctctctgcgtgcatgcaatcttgtgttcctgggcttgagcctggcatgatttgcagctgggtataagaacacaagcaatgtgattcattctggcactatttaaactttaagtacgtctcagatgtaaaaacaaaggagaatatgccaccaacctggttcatttgggtgaatataaaaaggagattactcaaagctttaaaaaaaatttttttaatgggctgtgtttctaccccacccttagggagtgctggctaggaagacttatgtattgtgttagttagcatgaaaggtggggaaaaacagagtagggcaacccaaagtcaaaatcaacaacctttatgaatctgagccatggactctttgcctaaaggggatgagggaggaaccaagtttccaccctcttaatgcggaaaagagagcaattgttgatagaaaaaggaaaatattttcctctcctcccctccccagaaaaagcatgattaaataacaaaggttgctgccccaaatccccatatcctaattagaaagtaaaaatggtgggcttttaaaaaattatacagaattcgtatataagacaacaacagagtagggtgtctccctccaaccttgggtctagtgtaattacacacagtaattaacaacgaatttgtaaccagtcctgttggctctgttcaggtgccaagtgtggtagtccagtggatcatcagctatgggtgcagaaccctaatctaaaggcactgaaacctctaggtgatgagtgatggattccaaacgattgcatagacttgagggaaaagaataaggctttgggactgaaaaagagacagacacctgggttactttcttggtgccaaatgtcatccctctggtccacagacctcttttggacagaatcaaatgcaagtccagcacatgcagcaaagcacagactcagcccagcacttaactctctgccagcctgagattaggcctgaggacatcgggctcagccagaagaggaggagtgccagaaagcttgaatttggcctgccatcctgtgtttgctgggacttgtagcatcagtattggtgctggatggcaaattcctgtaggcctggctatgtgtgaggctgaacagaattatctccttaatgaaggctttgggtaatggattatggtcccattgtgatcaaaccatttcacctattcccacacatagggatcatatcaccatcaatgaaaccaggccagccttaaattaaaatatagaccaaatctacccttggcctgctcagagctgggtgactttatccacctctcttctctcaacatgctccaccttccctgccttcctcctaccctccatgctagcaaggcccaaaccctctttgctgcctctgcctatccaaggatctctctcagtaaactggttatctgaagtgaggtcttgccccactccaacagacattcattgagtcttaactatgggacagacaatatgctatgtacaaaaaatacaaatatatattttttaaaaatgtgctcctcagccttgatgagaagagccatataattcactcaaaaataagtactgagccttctgctgtgggcaggacatagtgctgggcatgtcagagggcacagagactaagaatacacattctctcactccaggaattcgttgaaatcaagaaaagacttagaggcaagagaagaagagctgtgtagtggaaagaaccataatgtattgcccagttagtgtaaaagcttctaattgctctccttgcttctacttttgtctcctgtaataataatagcaataataattagtataatacaaatccatgcgccatccaggagccagagttttctttgtaatacataaatcagatcatgctacgtctagcttaaaacctcccaaaggcttccttcagtgcataaaatagcatccaaactccttcactgtgactgacaaggcactgtatgactggtccctatctgcttctccatcttacccacttcagacacattggccgcttttctgtctctcagatattcctgcctccaagcttttatctttgtagtaccctctaactaaaaatgattttcttccagatttttgtttggctggcctcatttcatcattcaggactcagttcaaatgccccttcttcagagacgctttcactgacaagcttgtctaagaaactcctcctcagtcactctatggctattttcttttcttcatgacacatgttgctatcagaagctatcttcatttttttgttgttgtttgtggttttcgtctgttcgtttaatggaaaactcaaacttaacaaatccaaaattcaaactactgatctctgcttctccaaaatttattgatctcagtcctccccatctcacctaaaggcaactctattcttccaattcctccagtggttcagattaaaaatccagggatcaccctggactgctttctttctgtacaattcatctggaaatcctattcttcaacatgttctaccttcaacataccacttttcttccagtctatcccactctctccttcatctttgacctatactaaccttctagctggtctctctgctgcccccttactcccacattgtttattttcaacggagcagccaggatggccttttaaaaatgagtagtatggctgggcatgctggctcatgcctgtaatgccagaattctgggaggcagaggcgggtgactcgcttgaggtcaggagttcaagaccagcctgcccaacatggtgaaaccccgtctttactaaaaaaaaaaaaaaatacaaaattagccaggcatggtggcacacgcctgtaatcccagctacttgggaggctgggcagaagaatcgcttgaacccaggaggcagaggttgcagtgagccgagatcgtgccattgcactccagcctgggcaacaaaagtgaaactccatctcaaaaaaaaaaaaaaaaaaagagtagtcatgtcatttccctccccaacactttccatttgggctgggcacagtggctcatgcctgtaaatcccagcactttgggaagctgagatgggaggatcacatgaggccaggagtttgagaccagcctggtcaacatagtaagaccctatctgtatatatatttttaaatttaaaactttgtatataaaaaacctttccattggctatctcactcagtaaaagccaatgtccagcatataggtctgtgctatctaatatagtagccactagccacatgcagctactgagcacttaaaacgtggctagttcaaattgagatgtgctataaatgccaatgcacactgaaattcaaataatatttttaaaaaatgaaaaacatctcattactcattttacattgattacatgttgaaatgttaattttttaatatgttgggctgaataaaatatgttaccaaattaatctaacctgtttccttttcattttttaatgtggccattagaaaattcaaaattatatctgtgactcacctatctacaatgtggcttgcattatatttgtatgggatagcactgatagtatatagttattagatagtatgtagttattagaccaaatgaggtcatctagtgagtgagtgtagacaaagaacaggtctaaggatagaattctcagggtcctccaaaattaagaagccaagtaagagaaaccattagaaagattgagaaagtacccaataaggtcagcgaagattttgatagaagactcagacatctctatttgagatggccacactgtaagtgctcagacttgaaaggatgatatccaagaaatcaaatgaagaaaatgtatcaaggaggcagtgatcaattgtttcgagtgagataaggactgaaaactgacaattcgctttgacaacgtggaagtcactggagatgctgacggggttgttttggtggagtggtgtagataaaagtctacttagagttattgaagagagagtaagagagcagaaatggatactacaagtatgaacaatactttgaagaagttttgttataaagaagataagaaaaatgcaaaggtagctgcagggaagcttgagatcaagggaaagtattttaatatagaaataaagcatatttatatactgatggacataaattgatcaggaggaagaagagagagccttggctgggcgtcatcacgtatgcctgtaatcccagcattttgggaggccgaggcacgtggatcatttgaggtcaggagtttgagaccagcctggccaacatggtgaaaccccgtctctactaaaaatacaaaaattagccaggagtggtggtgcacacctgtaatctcagctactcgggaggctaaggcaggaaaacctcttgaacccgggaggtggaggttgcagtgagccacgatcatgccactgcactccagcctgggtgacagagcaagattccatctaaaataaataaataaataaataaaaattaaaaaaattaaaaaaaaaaacaaacaggaagagagagcctctccaaaatggctagagtaaaattgctagagtgatctccttgagtagatgtgagatcctgggacctagtgtagaacaggagggctgtgccttggacagacccatggacagttcctcagaggacagaatggatgaggggacacaggcgaagatgcaagcaggtttggaagaagtgatgggaaccacatgtggaaggtctcctctgattgtttccattttcgccgtgtaaaagaaatcaaggccatcagctgagaataaagaaccaagaagtcgcaaaagtttgaggagagagcagaaggtttgagatcatgtttgtgaagcaagagttcacaaactctttgaatgaattagaattgctgggcccacttaaatttgggggctcatgagtttaaagtgataccaagcagtagattgggtactttcctccagccaagttcagcaaccagaaaacaggtacagagtaagaaaagggctgcaaataactaggattgggggttttccaaagaaggaaaaaaaacatgaaagaggctccagggagttacagttgtataaagtgagtgatgattatgatagactataagatctaggatggataaggaggtaaggatacacaggatgtaaaggacagtgaaaagatggtaggacaaattcattgttaggtcaacggatttttaagtcagaatgtgagggacagtgagctggaaagatatgaggtggtgggcctagggtagaatgcttgagattgagattttgatctatggctataccaccctgaacatgcttgatcttgtctgagctcagaagctaagcatggtcggacctggttagttcttggatgggagatggagattatggaagatgaggagttattgataaggacaaagttgaggggaggctatgaatggctcattccatgagcatgagtggctgaggttggaagagaatgaaatcattataggagaagaggtcaagggactcagatgccagagagtattgaaatgatcatctaggaattgtgacagaaaaattgttgtcacaaacaagtgcggataagctgggagtttacatcttcaaagaacgtggaaagtaacccagtcagcagataactgcaataagaaagggtagctggtaatgatgtctaaatttcacaccaagggagaagagaacttggtctaataggagcaataaaaaccagggagacatctccccatctctaagtccggaattctattcaaattcacattccaaatataggctatatgtttctggtctcacaagagtcatactctatcctaaaggaacctggaataattacaggcttcctgccttaactcaaaggggtgtggaaaagaaaataagcaccactcaaccaggctacaagaaagcaggactcagaggtccaggtttcagttaaaaaaataatgtgtaggagacactaagagaaaaggttgagaatatgagggctttagccgataatgggccacagagcacagaaaaggggtggaagtgggaaatgggcaatggggtcagaatagggaataaacaaacaggatgtagatctagactattaggaatgaccttatagtttggtatatgggatgaagggagtggcgagattgtcctggattgtctcttaggcagattgtggtggagaggctgtcagtgttgggggacgagggatgagggtcatgccagaaccttgccagggttctggggccctttgaaactttggtgtcatctttacgacttcctcagatccaggatgaatggctccctcattaaacttgccccctagcagagttgaaaacccctaacctaagccagcttatactttcataaagaattttactaaatcctgaaggaaaacataagatgaaataacaaacagaaaagacaaaatatccacattccaaatatgggtttctgatgccagaagagtcttgccctatctcaaaatgagctagtgtgactatatacttcatggtttaactcaaaaggaaatacttattaattgttgagacagaggcattgcataataccagtgtggggaagatgttttgaaaaggcatctttaaaccattcccaggcatttacccatatgcgcagctgttcctgtataggactttcttcacattaacaacaacaataaaaacacataaaaatcagcccaagagtaaatgtttcctaatggttagaaaaataacattttacctgatactgcgaatgagagattttcaggtcacgtttattgagaactagcaagatgagtcagtagctaagatctgtggaaatgcccttaatgacttttacaattgtttccttaataatggactcttaataagcaggtcaatgttaaattaattacatggaagtattctaaaaagcatattgaaacctgattttagcccattcactcaaggattaaagttgtactttgggtttttttttttttctcttcctgatagaatatcatctattggaaggaaatgtttaagcttggggatgaagtttaaaatataaaattaataaagagaagaaaatgtagttctaacagcaaccaggcaaaggctatgtaggcccagagccacaatctttctgccactcactgattttattacccatggttcattcagcaaatgatcaaggagcttcggtaatatgctttgctacctgctggagagtcagtgatgattacaatgccattcttagccgtgaaggggctcactctctggttggggaaaataaacactttagcaaacacaatacaatattgatattttgtatacagggcagagcagagaatggaacatttgaagtgggtcttgaaggatgagcagaagtttgttagaaaaggaaagcgtgccaagcagaaagaagagcatgtaagtatgatgcagactggcgtactggagaagcatgagcagttctgtgggacaggactacaggatctgaaaggaagaagtaggagaagaaactgcccattatagaagcatccaaattattacttctatgctaccattgcaccattgtcaccaacctcctctcccaatcttcacaatcaacccaaatatagtcattttgcacaagaaatccaagcacaagcatattataatttttgtaaagattaccaaagctctggaagccatgaagaagggtctcacagcacaaacatcagcattgcaccactctctcattcccttggccttcctcacccctcactgcccatccaacccaggcccaaatatgcagaatttctcccttctctgcagttttgctattttccaacaaccagaggttaataaacatcagacaacacccaaaataagggtgactcccttaaaggaattttcttacaatctgctatgagaatcaaagcttttccctctgattttatttctaaaacacacttttaatcctattgcttccattttttaaatccttcaatagctcactctggccaaaagaataaaatccaaactttagcagcttgcactcagcctcaatctaaatgctaagccccctttccttttacagcttcctcaggttccgttgtgtaacctataccccactgaagccctccctcctacttcctgaacagggcctatattttttttccaatggggctttgctcatttagtactctctctgggattcttgtccccattcatccacttgtgaaaattctgatccttcttgtacaacgtatccatcttattcaagcagggtttctcaacctaggtactactgacattttatgctgagtaagtctttgttgtagggagttgtcttatgcattgaaaaatgcttagcagcatctctgacctctactcactacgtgccagtaccaaccctcaccctgactatccatctatccattgtcataaccattaaaaatatctccaaatattgccaaatgtcctatgggtttgaaaattgcccctggttgagaatcactgctctctaatctgttttctggttacctccagtgagaaatcatttctccccactcattactccacaacactttgcaactctgttaaaaacccctataactaaagcaacaacaagaccaacaataagcagcaacaactaaagcaacaagagcagaataatatttaatgccatctcctttgtttctgttggttgcttatatgtctgaccctttccactgggtttgtgagctgttgagagaagggtgaagtcctggtgcctctagaccccagcacagtgtcttaccatagtaggtcataatttgaattgactttaataaagctattgtcttcatctatttgtcttctgactagccatttgatggccacatcagttggaagatcgagaagctaaagattattgaaatgctcttttgcaaggttttgttcatatctgggaagttataagaaacactaagaacagggaatggtggttcatgcctgtaatcctagcattttgggaggctgaggcaggcaaatcacttgagatcaggagcttgagaccagcctagccaacaaggtgatatcccgtctctactaaaaataaaaaataaattaccctggcatggtcacaggtgcctgtaatcctagctactcgggaggctgaggcaggagaatcaaggcagaggttgcagtgagccaagattggaccactgcacttcagcctgggcgagaaaggaagaaaggaagaaagaaagaaggaaagaaggaaggaaggaagaaggaaagaaagagaaggaaagaaggaaggaaggaagaaggaaagaaagagaaggaaagaaggaaggaagaaggaaagaaagagaatgaaagaaggaaagagaaaaagaaagaaagaaaggaaggaaggaaggaaagaaagaaaagaaagaaagaaagaaagaaggaaagaaagaaagaaagaaagagagagacagacaggaaaggaaggaaggggaaacatggatctggaggatctggagagggtttttttgtttgcttgtttgtttaatcttcacactactgaatggtttgtagttgagtaaatactagctttcagaatcagtttgggttaaaacagtaatgtggcttatttcaatttagtttgagtcagtttgcagacaatgggtttttaggtttaaaatataaagtagtggtccaaaccataaaacatagcattgcagtacatacaggtagataacattcctactgtctcattggtgtagtttccgtttgctgaaattgcctgaaagttcctcaaggacatgaacacatctgacatttctcctctctcctgtagcacctgctagtaaacgtttttgagttaagttgaaaactttccaatgaagggaaataaatctattgaccgggaatgctgcaggaactaggtttaaaggtaatttccagaagttgtggtgtagtatggcaaagcttgctgaaggcttatccccatatttattttacctttcttccttggggacagagttgagattttgtagctgggctctttgtcactcaaaataaaagattttacttcctagttcttttgcagtaagatggagacatgtaactgagtctggctaagaagatataggtcaaaatattatgttggacatctgaaaagggtgctttaaagatgcttattcaactggaaagggtgatttttacccttctgcaattccttattctttttttctggcatgcaactcacatgtaatgactgaaattcctgcagccatctcagattatgagtgaacttgactatggaagccatgtcctaggatggtgatgcaaaatgaaaaaagctgggatcctggtgataccatggggctgtcatacttgcaccaagttacctatctatggatttctttcattcactttaaatgcactattattttggacttttgtgagtttttttttttttttcaaaatagttttttgtttgttttccaaaacagggtcttgctctgccaccgaagctggagtgtagtggtacactacaaccttgaacttctgggcctgagcaatcttcccgccccagcctcctaagtagttaggactacaagcacacactattatgactagctaattttttttattttttatttttgtagagacagggtcttgctatgttgcccaagctgatctcaaactcctggcctcaagtgatcctcctgccttagcctcccagaatactgggaatagctgggcgcggtggctcacacctgtaatcccagcactctggaaggtcaaggtgggtgggtcacttgaggtcaggagttcgagaccagcctggtcaacatgatgaaatccaatctctactaaaaacacaaaaaattagctgagcgtcgtggcaggcgcctgtaatgccagctaatggggaggctgaggcaggagaattgcttgaacccgggaggcggaggttgcagtgagctgagatcatgccaaagttgggattataggcatgagccaacatgcccagcctggatttttgtgtttatatgcagctatacctaattctaattgatgcatatttaattgtaattccacaatttttatgccttccatgtggtagatcaatggttctcaacaaaaagtacatgtcactcacaaaaacctttatattttcagaaaatacaaatgttcatgccatactcgagtttttgaatcaaaatttacatggtgaccctctgacgtgaattgtgtgacaaatatatttttcaacaaattagataagttacatgacatacattcagttatatatagtatatactgcgtgtgtggcaagagagagagatttttatagtatttcctaatattcttttttattcttgtaaggttagtagaaatgtcccgtttcattcctgattttagtaattcctctttttttcctggtcagtctagttaaagcattgtcaattttgttgatcttttcaaggaaccagattttggtttcatcatctttctcaattgtttttatttatattctatgttttcctattctgtatcgttattttattctagttctgccctaacttttgttgtttcctttctgctacttagtttgagtttagtttgttttgctttaagtgtcttaagatagaagtttaggttgttaatttgatatttttcttttttttaatataggcacttatagctataaatttccctctaagcactgctgtagctgcatcaagaatatatttttaaagccctacagagaattctgatgtgcatgcttggtgagagtatactgtacttctttgccactataaggtttttgtttttttcaatttcccagcatgactgctgatcttcttcatagacaaaggttttttttataaagcaaaatactttggctttggtttggttagatattgcagaaagactcttgattgcagctcagaaatttctttcatagcctaatataaaaatcaaggacatgtttgctttacttgattttctctaagaagtgaagacttcttggattacaggggccctactttaagggccctttcagttggaagttttcctttctgcctgtatttttactatgcatatttttggcagcccaaaagcaatgtttatgtccattcatctgatagtgaaagcttactgtgctacctaagtcctttctcttggtctgtgtactttcctatttgccttgctttttccacaatttggcagcattatcacttactccacgtgacaagtgacatcattgctataatgagaattccaagcagcaccactggatcaaagcccatctgtgtgcctgctcccacacttgacaaaacaaattccaaattcattcagcatgccggtgccatttagtcactgtgacatatcctaaattttggactctgtgcaaaaaccaatctgtgcccacaaaattaatcacggaacacattttatgacgtttgacaacaacttaaaaggttctcatctctggcagttggctctgccaatctgcaagtatgtgcacgacaaatcctgaacaatacattgtgtggctgaaaatacattgtgcaggatgcacaacctgaagagggccagagttgagtccaaccaatcctgaagtctttctcagggacaactaagccagactgctgctttgtgaaggaaggatgatggccccaggtacatgcagaaagccaaagaaaaggcaacagttcatgtgccagtagatgctgagaaccttggcacaatcggctgtgttggcaggaccaagagtttgcaatcgctaatttaagcaacaagatcctggcaaaccgatttatatagggcaagggtgcgtcaggaagatgccagaaaaatacatcaatctgtgcctttacatgtactacagagtgatgatgaaacaagtgacattaaaaaagtcaacccttacactttaatagaatctgcaactcatcctacaaggaaaagtagggtttatgttagatctctggaactcacagatgggtttctatgttctgatctgagatctgtgataaaatttcccttcaaaggtgctcttgaagagatttttccatactgttatgattacttaattaggccaagtgtttttatatattgtttaaattattttaaaatgcagactctttaacatttgacaatatcattcacttcaaataaaataatctattcaaaattttactttgctgagtacatcagagaaattctgttaaaaaaagaagattgagactttaattgtacagttagaagcctttacttgagagtaatgttctaccctgcaatggcataactgtttcaaatagctattttatgtagtagtgcctatttgtgtacagttcaacaggcaatgaaatagtaaaacactccacttggagcatgttgcttctccatattactttccattttcctagcttccctttagacagccttctactcccactgttccccacccactccttttttcacttagtacgttgtatttgcaatgtctcgggttaagaaagcttttgtaccttggcagcctacttagggttttcatttgttatacaaagactaaatttccataatttagctttcactgggatttgtctagacccaaacatcctattctaattttacagttcctctacatctctgaggcaggaaataatatgaggaagcaacaggtgaagaggagttcttccacacgaagagcaattcttgattaggaggcctggtgatttaataacctggcagaggcatagaaggaaaaccagcttcccttggttcatgctcctaatggcctcctttgaatgtaggacagcaatccatcttctcttctttaatatgagggagttgactctctagatctttcccgacgctaatactcttgaatttcgattaacgaggaacatttcggggttctctccttacacaatagttgattcttttgtttattttgtatgttaagtacaagctggctgttggttaatttcaggcatatttttccctctcagaagtagtttccaaaacttttttcttccttatctatgcctaaaataatataaaataaattttaaaattagctagaaatgctgccctttatgcaagagctacatattcttttataatgaaaatcattttctcaataatttttctctgcagttttatagggaaactgaattttagtagaaaaaggccctagaaataatcttttaaatcctgaacacaggtccctgtgtcaggctagctgtgtcagaatcactagggattttttaaaatatagattcccagagccttctcctaaggattctgatttgataagtccatgaagttcaagggaatctgtatttatattaattactttattgacatagagtaaagtaatttttaatgtgctgacagattttttttaaagatttggggtgttgctgtgatgctcaggctgaagaaaagtggctatttacaggcgcaatcatacagcctcaaactcccggcctccatcctcctgcctcagtcttccaagaactgggactacatacaggtggatgtcactgcagctggctcagacagatcttattcagtggtcgtgccaaataaggaaacaggtccagagtgagaatgtgacattgtcaagatcacactatcacaaggtggctcatctatgattagtaaccagagctcctgacacttagtcctgtgctcttcccataatgtcaggctgctactcttatggaatttgcaacatttttcccaaatgtatatgtaatgtactatattagacaggccaaatacattgcctgctgtactctagccttttctaagggaagatattctacccccagacttatcagggacctgggtgaaccattacttccactgtaccagatagaattgattgaaccaagggtgagtatctgatcaagggtagcaaatccatagactacagcacaatgagattcaaataccaaacaaagcagatgtacaaatctattaaatgaaaattgtctaatcattaaacactactttaaacctagtaagtctgtgctttttcagcaaattgtgcttataattaagttttcttattccccttcccaagagcaaagatttcaaattgaaaagatgaggccaatacaaattaaatatttcaaaataaaatatatcaaatattatctttagtattgtgattcctatttattaattttcatttttattaaaatgtctttaaaaatgcaaacagcattacagggtttatactcaaaaaaattaaaagttgctgaatatgttgtatgcagctgatccaccttatactcataaacatttcctttattacatggcttttcaggtttttttggagttaataattgctttatttcctcccgtttgcttagttttctatgtgcctatcaccaatttattcccaaactctccactaaaatgcataaatgtgttatcagtatgctcacccacactggtgaactacatatttcatttttttcttggcaacacctcacctccacttctgccctgcttcagtgtgaatggattgctctctttgccagctgcatgtctgctaccctaggcttcccttcacaattgtggtggattaattttatgtgtcaatttgactgggctaagtgatgctcagatagctggtaaaacaatatttctgagtgtgtcaggaagtttctagaagagattagcattttaatcagcaaactgagtaaagatcactctcactaatgtgaacagacatcatccaatccactgagggcccaaatagagcaaaaagacagagggagggcatatttgccctttctgtttgagctcagatatctttctcctgcccttggactccagtgttctcagttctcaggccttcggactcagactagtacttacaccagaggctcttctggttctcaggccttggttcttcatgcttggactggaactaaagcatcttttctgggtctcccacttgaagacagcaaattatgggatttcttggcttctgtagtctcctgagccaatccatcataataaatcctttctatatatctaaatatattctattggttctgtttctgtgaggcaccctgatacactaatcattttgaaatcaccttaatctcctctatattggatcctctttttcttggattacacatacctttactggctaactttttttttttttttttttgagacagattcttgcactgttgcccaggctggagtgcagtggcgcaatcttggctcactgcacctcccgggttcaagtgattctcctgcctcagcctcccgaggggctgggattaccacccctggctaatttttgtatttttagtagagatggagtttcgcaatgttggccaggctgggttcaaactcctgacctcaagtgataaacatgtctcagcctcccgaagtgctgggattacaggcatgagccaccagccctggccagctaactttttttcttaaagatgggatctcactctgtcacccaggctggagtgcagtggcacaatcatagctcactgcagcctcaaactcctgggctcaagtgattctcccacctcagccttctgagttgtttgaactacaggtatgagctactgtacttggcttggctcacttcctactattgatggagcacattttctagtagctcttgagaaagtatgtatggaaggttaacaatttttagaacttacatgtgtaaaatatttttcattattccttcacacctgattgatactctggttggtgttacggggtgaactgtatctcttcccttcaaaaaaaaaattaaagttctaactcccagaaccccaaaatgtgactttatatggaaatgaggtcactgatgatgcaactaatttagggtaaggtcacaccgaaataggaagttcttgtaagatgatttccagctgacaacagataacacaagggaagacgccatgtgataatgacaacagagattgaagtaatacagttgcagaccaaggaacaccaaagcctgccagcaaactaccagaaagctaggaagagacaaggaaggaatcctctacactttcagagagcacatgacatcttggcttctgatttctcgcctccagaagtgtgagacagtgactatctattgttttaagtcacccagtttgttgtatcttgttatggcagccctagaaacctaatacagttggatatagaattctagtttgcaaataattttttctaaaaatttagttgctctctgtgtcttagcttccagtgctgctgaggagaagtacaatcttgttctgatttccaatccttagaatataattttttatcctctctggaaacttctaggatcttctatctattcctaggattctgaaattttatgatgattacatgtgttaaacatccacccgggtgtggcggctcacgcctgtaatccagcactttgggaaatcaaggtgggtgaatcacttgaggacaagagtttgaggccagctagccaaacatggtgaaatcccatctctacgaaaaatacaaaaattagcagggtgcggtggcaggtgcctgtaaacctagctactcgggtggctgacgcatgagaatcacttgaacccaggaggcagaggctgcagtgagccgagactgcgtcactgcattccagcctgggtgacagagcaagactccatctgaagaagaagaagaaagaagaagaagaaggagaaggaagaaagaagaagaaataaattaccagacagggaaaggaaaagagcaaaaaaaaagtccacaaactcagttcctaagaatagttcccgttcctaccaaagtagaaaaaccacataattcactttgggtatggggtaaggaactttgaagggtactgtcttagtagtgggatacaattaaccctacataaatgactgaattggttccacctaaaaaaaatcaaaacccaaaagaacaaaattgtttttcaagtaagtaaattttacaaagtctagcatcttgttaaaaaaaaaaaaatttccaggcatgcaagaagcaggaaattatgaactgtaatgaagagaaaaatcaatcaatagaaactatgccagaaatagcatagatcatagaattagtagacaaggatattaaaactgtcattataattgtagtctatgtgtttaagaagctgcagaaaagttgagcatgttaagacataaaagatgtaagacacacacccacacccaaatcaaactggtagaggcaacaactacaatgttttatatgaagaatgaactggacaggatttcaatattagatattgaaaaaagattaatgaatatgaaaacatagcaattatccaaaaggaaacataaagaaaatcttgaaaaaaaaatgaacagagcgtcactgagctgtgagacaatgccagttagttcaatatacatgtatattatgtacatgcacatgactccaatagtcacaccaaaggagaggagcaagagaatggaaagaaaaaatatttgaagaaataagggcaatgtttgcatttgtcttgctctacctggtattcctatcaaggcacctggtatatattaggtgtttaataaacatttcttgaacacatttgcagcaaaaaaaaatgacaacgagtaagagataagcacctgagtgttactgcaacgtatttaggccatcagaggacaaaaaaggggaataatatggagaaaaggcttggtagaagtggcatgccttcagcagggacccacgaaatgggttcaactgagtgtgtacaaagtttggagactaggaagggatgaagaagggcattccacacaagaacaacacaaatgaagatttggagcctggcacagtggcccacgcctgtaatcccagcacttcgggaggccaaagcaggaggactgcttgagctcaggagtttgagaccagcctgggcaacatagcaagacccccatctctactaaaaatttaaaaatttgccaggcatggtggtgcttgcctgtagtcctcgctactggcaagactgagacaggaggctctcttgagctgtgattgcaccactgcactccagtctggacaacagagagaaactctgtctctaaaacaaacaaaaagacttggaatcaggaataaatatggttgaaactatactatctggactgaagtggtggttgcacttagtggtaatgagaaatgaagttagttggatgagttagggtcagagtatgcaaggctttagaaataggaaacaggagagaaaccattgaaagtttctgaacagaacttgtgatgatgaaatcagaattcaaggggagaaaaaggagcatagtggtggcatccatgatggatttggagaagaaaatactaaaggtgaatggaaagggtggaccaggggcaaacaggttattaaaacagtcccatcatgaagtgttgaaatgctggatgtaaacacacctaccacagtatcagtacagactaagggcttggataaatgttagtcaaatccaagtactaaaattcttcttggttcgcgaaaatttcagaagtggctcaaaaatctgtaatgcattaagaatattatttgcttcacaatatttcatttacttaagattttataagaatcagctgcttataaaattgttactttgtggtgcaccaaagcaccttgttctctccctcacccagatatgtttcatgctctttgtactttccaccccttaacagatttggagggaagattcaagccgtggatttttaaatttaaagcaatgctgtcacaaattgagaactgacaacatgtcattacacatttaattgccaccgaatcccagagtttaaaaattgtaaggacctaagagataggacctctcgttgtacagatgcggaaactgaggctgagagagggtaagtgaacagtcccaggtcacagagctgctaatgggcaaggtgggactagaatccaggcttgactcctctacgctgagccaagggttcgaagcgattgggataagggaagcctgaggcagggaacgagagtcaggaaagcagctcttcccaaccctaggaggccgggggacctcgtcaccgcggaaggagcggagccaggccgacctaaaaagccgcaagtccaggtacccttaccctgatggccgcggcgacacactcggccaccttcctgatctcgcgatactagccggtactcacttttccggcttcccctaggccccgcccccccacctcagcccttctgtcgtcatttcctgtgggtctgtaggttaagggagaagatggcggcgctaggggaacccgtgcggctggagagaggtgagtgcagccgaggctcggcggaggtgggcggaagggttgggggagtgctgtgtcgctggaggggaggaggagtgacccaggctctgagatccgggccacgctgtcccttgtgccggcgccagaggccgccgttgtctctgtgcctggctctaggaagggcgcttacggtattttgtctgttaaccgtaagccctcctctgttcacacggactgttccaaggcacagcacaactaaacacaacctgcccgcttcgcagacacacgccgcacacgcgctcccttggtgagcacagcagaagcagcattcggagacccgtacacccgaaaagcaaacgtcacacacccggttcgcacagactacactcattgcctgtacagcacgagaacggacacacggtacaattcaacagaacctcctttccccgctgtttgcacacaaactccttcattactttctccacaacctcgcttgtattcgggttggggtatttgctagcttttgtgcccctcctagaaatggagaggttgctttaaaaacaatcctactgacttggtcttgggaaggaggttacgtaagtaagccgaatagtggtagatgctaaaacacttgcaggtgcagtgtttttcatttcttacaaaccctacaattgcaaactggttggctgattgcttcctagagcagactgtcaaggaaaataaaaccacctctgctgagtaattagagatagagaagcctacgaaaataactggctatgcgcctaccatgatttccagcattccagcgtttccagtccttttacagatttccagcattccactctgtccctaagtcctttatttcaaacaatttcaagcatgcttttcatacaccagcattagaaatcattgataggaattgagaagtacaaataaacattttgagtactggtggtaaaaaaaaatgtatatgtaggatggagactgaaattatattgcacatattaacatttgcaattagtctaaatattactattgttccctaagaaaacacatttttagaattactgtacttagaaaaacctctttcctaatgccttcccacaaacaaatgtgcacttaatgttgctgatttgctctttaccgtgttcaccatttggaagcctcactgtaaatgagattgtttccgttaagcctattaaagcatcattttagaggactagctactctgggaagacttgccgagttaggcctaagtctctgacatcttcctcttgagcacagtggcactgtgttttatagatgggagcaaatctgtttggtgttaacaggagtaagttttttctttgaaagctagttaagattctaacgtattggtcttttgtgtttttgttgttgctgtttggagacgtagtcttgctctgtcgcccaggctggagtgcagtggcgcgatctcggctcactgcaacctctgcctcccgggttcaagcaattctcctgcctcagcctcccgagtagctgggactgcaggcgaacgccgccaaacccggctgttttttgtattttagtagagacggggtttcaccgtgttgcccaggctggtctcgaactcttgagcttaggaagtccgcccgcctcggcttcccaaagtgctaggattacaggcgtgagccactgcacccggccggtctttgtatttttaaatgcaacacaaaatgtggaacttctgtggcatttagttttgatagtcttggctttgttttttgctgttacagatttcttttctgttcttcagtagaagactccacctcttagtaggatgaattacagtcagccctccatatccatgggttccatatttcaaccaactgcagattgaaaatactcagaaaaaaatcgtgtctgtatagaacatgtacagacatttttttcttgtccttattccctaaacaatgtgatataacaactgtttacgtagcgtcagatattgtaagtaatctagagattatttaaagtatagaggggggatatgcataggttttatgccaatactatatcattttatatcagagacttgagcatctgcagatcttgatatctgtggtatctgaagaaggtcctaatgaatcccccactgttaccaagacagctgtactagtggttgccatttagcagggtaagaaagtcagattacatcacctctgattcttgtttagaattctaacagactctattaacaaacactcccaacgatcctaaagtagaaaatcctacagtacaattacaatacagtgcctgatcacatatgatgatttagagtgccttctaaatcatcaaactatgatttaatgaaacacaaatttgagcacatagtaggtacattttagatttagtcaaaagcattttacttttttccatttttttcttcactggaaatttttatatggcttatatattataactttataaatcaaaataattgatgaaccaacagtccccatgtatcggtcattctggtgatgggaaatcagaatggtgaaggtctatttgcttccattgcatttgattaactttttaagtttaagctttctttacctcaaatttaaaaatctgctttctggccaggcgcagtggctcacgcctgtaatcccagcactttgggaggccgaggcaagcagatcacttgaggtcaggagtttgagactagcctggccaacatggtgaaaccctgtctctactaaaaatacaaaaattagctgggcctggtggcaggtacctgtagtcccagctactcgggagactgaggcacgagaatcacttgaaccctggaggcagaggttgcagtgagccaagatcgtaccactgcaccccagcctcagcaacagagggagactccatctcaaataaataaataaataatctttctgccaggtgtgatggcccaagcctgtaatcccagcaccttgggaagctgaggtgggtggatcatgaagtcaggagtttgaggccagcctgaccaacagggtgaaaccctgtctctactaaaaatacaaaaattagccgagcatggtggtggactcctgtaatcccagctactcaggaggctgaggcaggagacttgcttgaacctgggaggcagaggttgcagtgagtggagattgcgccactgcactccagcctgggcaacagagtgagactccatctcaaataaataaataaatatctttctttactacatttattcatagttttctatctgcaaacacgaagaaggccatactaactctataaagaaaaatttccagtccttgagtgtaacgaaatcaggaacttctacttaagtcaaaaggaagcaaagcaataatagaatactgggcattgtagtaccaggggtacaaaaacagtataccaaaacagtttttggaaaaataaaagtagagatagttaacagtgttatagctgacttcctgaatcttctaaaatgtctcaattcataaaacacttatcctcacacttctcagtgagaattccctaatgtgcttcatacatttgtataaatgtatacaacctcttagggttttttttgtttgtttgtttgtttttgttttgtttggttttttgtagatggagtttcactcttgtcacccaggctggagtgcagtggcacaatctcagctcactgcaacctccacctcctgggatcaagcgcttctcctgcctcggcctcccaagtagctgggattacaggcacccgccaccatgcctggctaatttttgtattttttttagtagagttggggtttcaccatgttggccaggctggtcttgaactcttgacctcaggtgatccacccgcctcggcctcccaaagtgctgggattacaggcataagccactattcccagccaatatttcttatgattaattggtaccaatgtaacataacacttttgcttgctaagcccttttttatgtattttgtggttcagttgttaactgaactcataactcttcctcataacccttatatggaaggtactgttatttccattgtacagtgaaagaaactgagacataaggacatcatgtaacttgcccaaggtcacacaggtggtattgagaccagattgataaagctaattgtttttatttttcttttttgtaaacataagtgttggagcttgtttgaattaacagtgttaattaagttgaaaaaaaatcagtttatttcatttgtactgcttgttttttgcatttttatggttgttttaaatgtgtccctgccactaactgcatctgctctcgagtggttatctacctatgtatcatgtttctttcgaggaatgaccagtgattttactagcttatagtgccttgtactgttcagtgctttggttactaataataattaggtaaatttttattgactagtttctgacaatattgctagcttttctgaagcagtacaatgttcatgtatcggtcacatttgagtcacagtcctttccgatgacatttggtattttgtgttcaatttgcctgtgtttctccaaggtcttattttatgcttctgtaatctcagtagtttttcctatctactgtaaaatttagtgttcttacattttacattctcaccctccatgtgtgtacacacacacagtctccttcccaccaaatgtgcaaattcaatgctttttttcccctcgattgtctgtatattatttgcccttgaggaatgaatcctaactgccccactgttacataggcattgagaaaacccttggagaaaattatctgtgtgtgtgtttaactctagatatttgtagagcaattgaattattggaaaaactacaaaggagtggagaagtaccaccacagaaacttcaggctttgcaaagagtccttcaaagtgaattctgcaatgctgtgagagaggtgagtaaacatcattaaaatttacaaaaatttgagttaattaggtcagataatactctaaatttgggttcaacatttcttaagaaaaactttagaaaacattaaaaccagtccctctcatttttggaatttctgataaaaccattttataaagatgcataactttgcctgaaattttaacttcacagagaactcaagcatggtatattctgagatataactttggcttttacaggtatatgaacatgtctatgagactgtggacatcagtagcagtcctgaagtgagagcgaacgctactgcaaaggtaaatttttttgttttccaaaagtaagaattcttcataaattagaagtttaaaatatggagttattaaattcataataaacttactttgaagactaacatgtatctttcaagctacaccaaatttctcaagtactaagaaataagacatttgtttctattgcctttacataaatgctgcatgataaatagcttacataagctattttatcatgcagtttagataatgcaatagaaatgtacttgcatacaatatgtatcatgcaatatataattgtgttgtatatgttatatatatgatactatataatattcattatacaaaatctaatcagaattttaagatatgaattactatcctcatcttattgatgaggaagcatgaggtgatttgccgcaaaccacacaaatagcatatgatagagctggggtacttccccgagttgatttttgctttcttctttacattatctgcatttctgtgccattgttttcctcaaataatttaggtattgacctcactattcatgatagggggtttgaacagggtaatatcagcagtcggtgacttaaattaatcatcagcagatagttttttatggatagttactggctcacaaaaggaaatggtggattctttgttgaatacaaatacttaaacatgtggatatagtttatcagtgtagaaaagaccagagaaacatggttttaattgctgagttgtgtgagtttgatagcctactgaatttctgagccttaattccattatctgaaaaatgaggcctttttcagagcttcgaagataacgggtattcagtaaatcttgatttcttcaaagataacgggtgttcagtaaatcttgatttctttcctcctccccatttttgtgatccatcacaaaaaaatggtactagataattaccctttaaagcaaagtgaaacaaaatctcaactttataattagtttggattagtctaaagttgagctttaaagaagatacggctctgtttcatcttctgtggggatttttagttgtgtctagttaactaaagcaacaaaacattcagattggctatatgtacctctctttttctcaatattgagttatttcttgacatcttagatatttagtatatagtacaaatagtacagaagccaaaatgattacatataagggcaactccatgttgattatataggtaggttgtgtcctgcacaaaggctcctgaaggagttgggagatccagatctaaagcccagggctgctagcatgctggggaaggggttttcctccttaccatgtacaatatcagtctgcccagtaagtctgcttgccaagccctgcgcatacaggactgcacaaaagagtgggcactgaatgggctaggaatgacctaaaaaatcataacaaaaaatcgtaacatttcctgcataactcgaaattattcatttgtcgtctctaaaataccttctgtttagcttaccttctcagaatcaccagtgaatttgtgagcattcagacgtcaaaaatacgtgctcaaaagtagtttttaaaaagagacaaaagaggccaggcgcagtggctcacgcctgtaatcccagcactttgggaggccaaggcgggcggatcacgaggtcaggagatcgagaccatcctggctaatgtggtgaaaccccatctctactaaaaaaaaatacaaaaaaattagccgggcgtggtggcaggcgcctgtagtctcagctactcaggaggctgaggcaggagaatggcgtgaagccaggaggtggagcttgcagtgagccaagatcacgccactgcactccagcctgtgcgacagagcgagactccatctcggggggaaacaaaagatgaaagaactgaagtaaataaaagtcatatttttaatatgtaaaactttctttcaggctactgttgctgcatttgctgccagtgaaggacattctcatcctcgagttgttgagctaccaaaaacagaagagggccttggattcaatattatgggaggcaaagaacaaaactctccaatctatatatcccgaataattccaggtggaattgctgatagacatgggggcctcaaacgtggagatcaactcctctctgttaatggagtggtaaggatgaattttatttctatttgtagtgatctgttgtgaccacctgggggcgtatttgagtaataggagaaacctaagaaacttgtggtttagaaatgccttgagggaatcctaggcagtactattaatacagtgatccttttttttaagcactataagtgtattttgcagtgtaaattagcagtgcttaatgtcatttttatgacataagctctttattaaaggcaatacattaaattagaagtctaccctcattttactcttataaaatgccaattgcttgatctactgaaataataaggcatatagattaatatgctaattatttggaacttaaaagccagcttttagactataaacagaatatgatgtaagagaggatttcatatagattaaaatggtaaggcaggattatttcttagttttgtaatgttggaataatataacattaaaacttttcttcattatatatattgtaaacatttttgcattttgagttactttcaaaacttagatattagtgtatggttggttgtttttttttcccctagagtgttgaaggagaacatcatgaaaaagctgtagaactgctgaaagccgcacaaggaaaggttaaattagtggtacgatacacacccaaagtcttagaagaaatggagtcgcgctttgaaaaaatgagatcagcaaaacgcaggcaacagacctaatacatttcaaaacttgatatttcattttgcgttttagctagagaagttttccttgtgacttactaatggctgcaatgccaatgattgtaagaaaacaaacaaatttatcatgaaattctccttgtcattttataaatgcctattttaacatcatttatggttccagagatgcatacacttttttctgacaagaaaaagtaaaaggtgatgagggcaattctgtcctactgtttttacaggcctttttcaaatgcagattttgtcataaagttgttatagattttttaaaatgcttttttaatattaaaatgtacttttacattcttaatctttttttagaaaggaaaagttttcttcatttagctgctgatttaaaagtaaagttctccaattctttttttttgcttactctattttttttaacctgtgaaatttctttacagttttccaagaaattaagcataacagtctcatctacggcagttcattacactgtcaatgttaacatcattgctgcattttgtactttgaacacacacataatatatataaccagtggtaaatcatgactcagtacagtgcaagttttttcacttttacttaaacataatatataatggatattcatttatactgatttatgaaagtaagtttttaaacactgaaacaatcattgctaaaatacatattcttaatatttgagcattgaggcaagaggatgtaattgatagcattacttattacatccctatttatgttcaaccgtacatcaaattataaatgcaaaacaggttcagatttcatcttttgtgatttcttttaaatactattcatttttatttaaatgcacagtatttcccctatattttagtccttccattcctagagacaaaccagttatttggtggtgggaagtagctgaagcaaagaaggaaaagtaatacctttaacctcactagcttcaagagtagacattcttactagctcaatttaaataattgattttaaataggaagaaaagaggatatatttaagatacatagaaattatgatgtgaagtattcatgagaatctgtagattccatcaaaataagtaggaactcatactaaaattgttggatttaaagaggcaacttttgtttatgattcaaatatgggaatttgagaaatatttcatttgtccactggatgtcactattttactaaaaggcagctattagtgtgggactgtgactgaggtcttaaagactgaaagagttggggttcattttctgttacaacttacaggaacatttgtactttaagaaaaatttaagtgacaaatgttagaagatgatggattgaaaaatataagtaatttggcatattgaccctatataaaaaagtgggcattttgtaacattccttcaggaagaatagaattgtatgcttttttctgcatgtttgtgatcactgtgagtctcagatgattattccagttttcaatgatttttcaaaataaaagtcaatcagcattgttatttatcattaaggtattgaacactggattgcatggttgaatgtgtctttaatccactacaaaatgtgcttgttattgataggatcatgttgttaaattgtaaattttcaaaattaattgatgttttaaaaatgttgagaccaaagtagtatagaagtatggacttaatttaattgtaaaattattagaggtatttgttgtagagctttatatattaaagagaggtattggtgcatataaaaacagtaatattattgttatgcttgtattcttgcatttcagggtaagtaaaccctgaagaaatcttattttagtatagctacagctgcagtagcttttaagtatgtatcaacatttcattataaattatagcttcctggttctgtgtctcagctgtttcagaactttcagccaagttaaatcttttttggtgttgaaacttttagtaagttgagtaagctatttttttccctacggtaatccacaatctgttctttgtgtgggttgacacctatttataattcttaaaataagggtagctcaaaggagccaagtacagtagtttagcttgctactgttgagcatgaatagcagtaggttgttttcattaatgcagttttcataatgtatcccagaattttaaatcttgaccatagaaaaatacagtcattcattggcaaagatgtacagtggtggtttagtgcagtgaggaaatgatgggaatttttatcttagaaatggatgattcgtgaataaaactaggtacatagtaagtgtatgatagatgtttgatttgtaaattacaaatataaattatcacccccatttccatttattttcttgatatatcaaaatgtgttgacttagtgattctcaatcttagctacatattagcctggcagagctttaaaaaattgatacctgggtcctattccataacaactaaatcaaaatcacccttttttttttttttgtaaagctttccaggtggttctaaaggacacctagggtcaataacccattataaaatgatctgattacactggacactcttaggaagtatcaaaatagaacagttcaatttgcagctacttaatgattaattacatttcttaggttttttttttgttttttttttggtttgtttgttttttgttttaaaagagacaggatcttgctttgtctcccaggctggaacacagtggtgtgatcatagctcactgcagcctgaaactccttggcttccacctcagcctcccaaagcattaggattataggcgtgagccactgcacctggccaagtaatttcttttaggaataaaaggtacttggcattccttatttgggaagtaattacagtcttatctttttttttcttttttcttttttttaataaaatctaccagtaatttaaatgtgagctttttatgtctgtcatcattctgccccctttgcctttaaaacttacaaaaatacgtgtttgttatttgagaaagcatgtttaaaaattgcagatgagaaatattgtcgttaataattatgtactgtcttaatgtgggcacttcatttgttagtataatactagataatagcagcctagttctttaggatttgacgattcaaattttttttttgttttttgtttttgtttttttttgagacagagtcttgctctgttgcccaggctggcgtgcagtggtgtgatctcggctcacttcagcctccgccacctcaaggcagttcaagcaattctcctgcctcagcctcccgagtagctaggactacaggcgtgtgccacctctcccggctaatttttttgtatttttagtagagacggggtttcaccgtgttagccaggatgatctcgatctcctgacctcgtgattcgcccgcctcggcctcccaaagtgctggaattactggcgtgagccaccatgcccagcctcaaatatgtttttaaaaaatatcattgtcctcctcctcttaagatttttttaagttattttgctcaagtacttaagtagtctggctcaagtactttgtttacaattaaaatggatattatagcatttaatagaagaaatggttatggcttatccaaaaagaatgtcagcatgacctggtgtagacttaaaaaactacatgtttgtgaatattttataatgtggaatgatcattgaaatatcaaggattctagtaattgtatttcctgaataaatgtatgtttatgaattttctaacttacattttgttgtgtcctctgccaacaatctggttt

SEQ ID NO: 957 - DNA, 76344 bp, Mus musculus
ggtgaaaccagccaacccatcctttccttttccctcataactggcttccttggcagtataattcctaacacttagctaggcacatgggtgttctgaatctcatgcatgtttcctagcctgcatgtccactagatttggtttgtttttttaaaaaaatgtgtaccagaaaaagcagtatgtttaaatttctagatgctttcaaaacttttccatagctctctagtagatttgctctcgtggtccgggtccctgatatatttgttcttgttattgttgttaaagtttctgctgctgctgttgtttttgttatgggattttttgttgttgttgttgttgttgttgtttttcagacttaaacataaattctcaaaaatctccccaattcattcttttgagctctgctgaatattacattgaaagcaggagtggatacagggtatgtggggtctgaagtatatacaatttgaggggcatcctttacaaaaggaataaaatgttacaaataaaaccttagagccatcagaaatatttatttagaggaagggatctcaaagtgacacagtatgtagaccagccaaaccaggactagaccccagagcatgtgtgcagggagtgtgacagtgctggctcaggcactaacaagctatgtgacactagacacatatcttctcagtttttcccttctatccctcttaaatgagggcaataatactaagcccgcaggactgacaaatgccctaacctccaacactatttctgacatgacaaagtactcaagaagaaccaatcacaaagaaggtgtctttccactcaaaatctcaggttctgtttcagagatgtcactgagggcaaaggctcatcatccatgttcaactgcaaagctacatcttcggcctacacttacttttctgtctggagctatttgaaccaaattaattctaaaattcattaaatcttatgcttttttctattgcttcctgcttgcaatgtatttggatacattagtgttgccaaatgtaactgtgaatgtaaaagatattgaatccttaaacccaaccccacaactcagaaggacccactggagagaccttggctctttgaagtctaacaagagctgttatctggtaaagacacctcagccagtattgctgccagccagagacagcttgacctgatttcatcaccataatcaggtgctgttatattacaagcacagtaatgactcccatttattgaacactcactatctgccttgtaaactggtatctaattaacgcattaaatcctcacaaagcttcacataacagttatgattacccatacttttctgatgaagaaatggagactcggagataacaagtagctcgtcttaagcaaaaccagcaacctgtctctagcttaccagattacagtctcagcaccatgtccaaacccttaaccatcagcagcttactttctgacttggcagatgaagaagtaaaacggtgaaaatgaacctatacaggattgaaagaactataagcacccaataaatcagtaaaattacgttgttatttaaacagactccaaaagttaatagttggcatagacagccatcttacatctgaaacatccattggttcagaattcaggtaaatctcttaaggtggcattgccagggatcactttggtaactgatggttgctctggtctggaggattcaggacagctttactcacagatctagcacctcagggcaaactggaggtgggacctcagtagccctagttccctaaagtctcacagcttccccatgtggtagctccaaggcaccaactacaatcaaattattcatcccaatactaaagctacagaatgggatggttttgttttattttttctacagggataggaagtcagataatttggctctttgaactctgagtttgttgatttgccaaaataaagaacattcttggggtggtttcaaaagcagaaagtctttcttcctatgagaagacagtcatactgaacaaaactccacactacatcctcatcttaaatgaaaaatctcttttacagccaagttctatacctggtcacattctgagacactacagattagaactttgatatatgaaacctgcaagaaggaagaagatgaataatttagcccacaataagtgtcagatctagtgctgttaggtaagttggaaaagatgcccaaagagaaaaggtgtttgccaaggttagacaacccaaactttagcagtgagaacaagaactcttttccattcatcccactaagaaaacattggacagttttcccaagatttatatcctgtgtcttataggagcacaaaacagaagcaggcttggtgtagggactggcaattcctcccattctttagaaatttcaggctctttacaaccacctatatcacaagacactaaggtcacggccttctttgcacacccagatctctgggctatccatatttccctttcttggttgacatttctagagtacaggtcactatttagattctgaatcacagtaatattggagaatatgatgtccttgtttatggcttaacatagatctatcaagactttgggaacatctccacagtaatttgcaaacttagacccattctgggactctgactcatcgcattagtgccccctaatttgcagtgtataccccatctttgatttgcagcttttgggtttcaagaataacctgcatcttggaaagaaattggctaatatactatctaggtttcttctaggatacatctgctaccttctaggatgaagagagctgaagttgtttaacctctagggaaatgtagggcaactggggctcaatgccttttttccagtctctccttgtattccaacatatttctatgctgtatgagattagaatacatgtcttcccagagataaaaggagcaattttatgctaagtcatctagtaaaattatactaagcttgtattatatatcactatggggttggaggaggggaggaggcagtatagtatatatatatagtatatatacatagtatgttgcaacataaataaatttcaacaaaacaaacaaatatgcattaagagaatgatgtggcaaaaaagttttatgctgcataccattcaaaattatggattatgaaaattgaaaatccggagttttaattcttatcctatcagttgctaaccatgtgattcatggtttgttagaaagatgtttaagcagaagtacatatacaaagaactaaataaaaaacctggcacaaatcagtgcccaatacataatagccaccattcttatgcctcctaacagggctgtaagaagtaaatgattgaggcttttgatctctcataatcctcaccaaccttgcaaatatgattttcccccattcttcttcacttcataaatgatttcttcaaatatctacttggtcctgccagaattttccctccagtaagaagcagaggaagacaagatgttgaaggaaagattcacagttccatgttgtctggggcaagagaggtagttaggacaacagaaagcacatatgtgtcagacgtttctaaggaaacactggagagaactgtctttttctctgacttgcttccttggtggaactgatattggcttgcgataccaggttgagtccttggttggttttgggaactcaaaacagaaacttctaacagctagtcacattcacatccaaagccaagagcagagaaaaataaatgcatgtatccttacctgtttttctttaatccagtttttccactcatatggtttaaggcctcctttctagggaatggtgtcatccactgtgaactgggtcctcgcaaataaactaacttaagacaatagtgcatagacatgcccctcagccacactgatatagacagtctttagttgagactgccttcctaattcattcttattctctttctctccctctcccttctctctccctctcctccctcccttccctcctctctctccttcactcctcaccctttctatctccctttttctctctcaaataagtgttttgcctgtatgtatgactgtgcaacatgtacatgtttagtgtcagcagaagccacaagagggaaccaaatctctgggaactaaagttacaaatggttatgagtcatgggtgctgggaatcaaacacagatcctctggaaaaacactaagtgctcttacaagctgagccatctatctgcattcctttggattgacactcaggacatagtcctttctctcaatctaagcttcggttattttccacccagaaaccataggggacctacactctaaacctacaatcctttaagccaggtttcacagggtagccagtcatttctacaggggattgcagccttggttaaaccttgatttcagcatcttcagaagacaccattcttctctcacatccaggactggtgagataaagctgattcagaacccataactcataaaaaatctgagtaacaagtgggcattttctttaaagtactagttttttttattaacaaattaacataggaccctgggagtttcacaccagctagtttttttttttttctcctagaatattttattcctgttccattggtcaggctgattcttttttttttttctttttttttttccattttttattaggtatttagctcatttacatttccaatgctataccaaaagtcccccatacccacccacccccaatcccctacccacccactccccctttttggccctggcgttcccctgtactggggcatataaagtttgcgtgtccaatgggcctctctttccagtgatggccgactaggccatcttttgatacatatgtagctagagtcaagagctccggggtactggttagttcataatgttgttccacctatagggttgcagatccctttagctccttggctactttctctagctcctccattgggagccctgtgatccatccattagctgactgtgagcatccacttctgtgtttgctaggccccggcatagtctcacaagagacagctacatctgggtcctttcgataaaatcttgctagtgtatgcaatggtgtcagcgtttggatgctgattatggggtggatccctggatatggaagtctctacatggaccatcctttcatctcagctccaaactttgtctctgtaactccttccaagggtgttttgttcccacttataaggaggggcatagtgtccacacttcagtcttcatttttcttgagtttcatgtgtttaggaaattgtatatcttgggtatcctaggttttgggctaatatccacttatcagtgagtacatattgtgtgagttcctttgtgaatgtgttacctcactcaggatgatgccctccaggtccatccatttggctaggaatttcataaattcattctttttaatagctgagtagtactccattgtgtagatgtaccacattttctgtatccattcctctgttgaggggcatctgggttctttccagcttctggctattataaataaggctgctatgaacatagtggagcatgtgtccttcttaccagttggggcatcttctggatatatgcccaggagaggtattgcgggatcctccggtagtactatgtccaattttctgaggaaccgccggtcaggctgattcttattcagaagcataggaaagcaggctctgtgagagtgagtattcatggtcatgcattatctgtgttggggtaaggcagttacagacatgaccaccagatatttattttcagggagacatttgggaaagctgcctcttcctcccacctacttcctgaattcctggtcacccacatcaatccaagaccacccaaagcaaaggtcttttggggattttcctgttaaaaacatataaagctgaaatgaattttgacagaagactagagtcctttgataacgcctggcatgtctgacatttccagagagctccctgggtaaatttaagtctctagcatcgatacatattcagtaccatacagacaagcactgagtggtggtcaattcaataaactctgtgtttccctaatataaaatgatggagtcagccagagttacccgaaagtcttactgtctttgaactttacatatagaatatcaatgctgggactgcatatataaaaacactaacaatactttcctatcaggtgaaaaggagactgtattccaggattcatgtggatgaaaaagtcacttaaagaaagcacactgtacgctgaaactattcacatttatttgctgaactgaagagaaataagttccatttttggatgaggcagaaaagtggtgtgttacaataacagagctcttgagcctggggaacgctgataaagtacaccatatgctggagttagggtttccatcgaatttataaatggccatttgaaattttcctcaatcaacaaggagatacttcctcattctctgtctttcccttatttcctgatctatgagcagaggagctttgccaacaggaaccctacttgctgaggccctgaggaaaggcaatggccgttctctggtcttcattccttgccaggatcattctacccttgcgtccgtaaagcactcttttttttttttttttttttttttttttactttttttttttttttaacttttggattttctttttttttttttttccattttttattagggatttcgctcatttacatttgcaatgctatatcaaaagtcccccatagccacccaccccctctcccctacccacccactccccttttatggccctggcgttcccctgtactggggcatataaagtttgcgtgtccaatgggcctctctttccagtgatggccgactaggccatcttttgatgcatatgcagctagagtcaagagctccggggcactcttgtctcagcccattccttctacgtttttcaggatggcaacaaacacctcaatgctgcactatgtctcctctcctttcaaagaaaaacagacctagtttctttaacctttcagcaaattccccaaatccctctgtcattctagttccttctgctatgctttctctagttccaaaataccctatttatagtaagaaacccagaatgagctcaggactcatcatatgacctaaccaattccctttccatgactagaatagttttttttttctgacttctcttccattctgcaatttactcagtgtatctcaaatggagcagataattcttcttttatttcattccatgttaaatgacaaatattcatattctaagctaatgctatttattataaaacactggtgttcattacaatcaacacaattctagaattaataaattcagaaagaggttagagcctgtggtttatacagcattacaattttaaaactgttttttttcccttgattttttttaaactgtatgacattcactccagttactcgagagatttcttagctgtcaatcacaccatcgtgtgagtgaatccattgcctggaagaacacgctttagcactcagctgtgcaaaacaatgcaaccctgtcacctggaaatttgttgaaaatgccagatcttgattcgtatcccagacttggaatctgctttctaacaagccgccaaggaaatcgtgtctattaaattatgagaaatgcagttcagcagctgtgaaatcttccctccagatactgcaggcagagagatcttgagtgtctctcgctaggcctaccacattgcgcttactatgttctcctcactggttttcatttgcctttccataatgttaactatgcccatccatcccttcttactgcctttgattcatctttgcctgtaagacagttttaagagatccactcagctctagttccatactccatggggtcttgcttcagcttcattgtgaggctgtctggttttctgaaactgagttaggtcatatccaaatcttctagctcaagcttagttgtcacactgaggaatgcatcttgcagatgagctcttgcagactaaatcgtgagtttccaaaagctttctgtctctctgtcttttttgatgctctgattgttttctttccagctaaactaggtttgttagatggaagatttcgtgagctctttttaaatatgagctcaacaccaggttcttggcaatcattacccattcttgttttcagaaagctttccaaattgtgcatcgtgattctctgcctctccttctattgcctgtggagaaccattaggaatcaggaagtgactaagagaccaaatctttcttcctacctggacagaatcacttcttatgtcataaacagaatttttttattattacctgttttcttaggctccaagtcagtaactttgctaccatctgaagcttctcagtggccactttcctgcatggattgtaactagcaatcttgaggtgatgaataagagaagaaaacactgagggaaggaaatatcttacattaattaaccaagtgctcaactctgaaattcaaggatgctttaaggaattattaatctatagttcattagcccttatcactctacctggggcagaatgagagcaagaggaaggatttaaagtagtagtaagagagaaaggagaaaataaaacatcaaacactggatgagatggagaactcatcaacaacagagtgatttggtgaaaacacttgggcatacacttgagtactatctcatccacctcaacgtgttagcagagttcccagctcatcagtttgaatatgatgttgtaaatttccatttaaaaactaagagtatgctatttcaaaagatacccaaccatctcttaatttgctaaggaaaatatttctttctaattctgacttctattaccccttcccactacttctgagatgcttcaaacatcaaatgtgttcttgtaccatctattttgatgggctcttattcaattttgtgcttatctttataaagcaacagacagacagaagacaagctttttaactgtggcattgatagaataccatgtgaacacaaacaaagcaaaaatccttcctctgttaggttatgttcctatattttgatttaagtttggatgcatttttgagttgtgatacttaagacatattttttagcattcactttgaaatggtcctatcattgcttaaatgaatggggtcagctaaattggagaagtgtgatattcatatcacagctgactagagttgtgtgagggaaaaaagtggcatggccttgggaacaagtgttcccaagattaaaattgtagcaggtacactggttgacatctattttaacaaataaaatgactgtagccttagcttgtattaggtactagatttctacagacagaaaacaaaaaggaattacataagtgaatttgagcagataaaaacctggaaagctgataatgaaccaggagaacagaattctccttcaggtcagggagaaatcaagaaaggaaaatatacacatgtgtggtcattacacatatatatcacagattgatgtaggtcaaatgccatctcctcactcttccccacaacccactacagtaaatctcattaaatagcgattctcattattcatcttggtccataagttgtatggctttttaataatagctccaagcaaggagggcagaaaaaaaatattcctttggaaatactttcagtacaatcctgtgctgtctaaatattttaaatctaatcactcattcatattttgaatctagaaatacctaagccatcaatttagtgtgcccgtaaaacataacattaatttttagaataaatatctgttagagaaggctataccctataatggccagaaactgttgacaaagtcattaaaatgtcaatgagaaataagtgtattcgcatacagaccatcctcccacgtcattttacgatttcagaccagtctgaattcatcaacaggcaagagaacttactaacagcatgatgaattgcattctcaggaaactggcttttctcacataacctgtaccccaagacctctgaagatggcttatgccagctgtcttagtcttagggcagcatctgctggctaattcatggatggacaaaaagtgacaatttatgaacaatatgaacagtgttgtttcttttttatttgatttttgttttttgtttttagctggaggtaactgttgccttggtgactgtaactggtggatggtattctctaagtgatgatgcacaccaggtcaccaagagcctctaagaggtaaagaaagcctttgtacaaatatatgttggctggagcctagaatgatctgggttgactttgaaaacatctctttaggggtgcatatgaatgcgcaacactggatttactgctaatactaataatctagtaccaatggagagtccaagaacagaacttcacagaaggcattaaggaagtaacgcttaggtttctttaaagaagcattcttaggataggagggggaggggacctgaaccttgaagcagccactgcatgctaatgttcttcaaactcatcctatgtataactctgattttatacaccaagaactacgaattcccttcaaacacagcacatttgatttgattaaagaaacagaaattttaaaggactgggtggtccaaaacttcagagctatccaccatcttccgcaacatctccctgcctcatccctgcagtcaatagcgccacagccagggccagtgatgcctttggtggggtccattggtgggaactccagaggaagagcaaaatcatggtgtcggcaccaaaccggggaaacctgaaaagcagcgtccggggacttcccagggcactcgcactcatccgagctgcgggtatctccataacaactggtttacattacattcattctcggctcctctgcttcgctgcgtaagctaagctgagggtaggcaaaggaagactctagtgaagagatacctggagctagcgcctccctatgttgggggatatggttaactctggacttacagctcatttctagagatttccggacatctgcctaggatctcagcctaagggccttgcccttcccccactgcacccctcccccaccgcatccgcctttcaagagattatttttacacgcccgcgcacacgcgcacacacatacggggggaggaggtttattttattgtgactcttcttgaagttcatctctttccttccaacttactttcctccaacacgtgacctctccacttcccagcctgcgcagtcactagtgggaagtgtagtggccagcgcgaggcttcctgggagagcccccccgcccgaagcccacctcctggagcttgcggcttcagttctcaaccccgggaagcacccaaaatagggcagcgactctggggaggaagcacggagccggagccgacgcggagctgggagactagcgccgatcttcccctcctagcctacaccttttcgctcagagctccagggcggacctagccgcgcacagaggctgttaactctcatttgagaagccataagccattagagcaaacgcagtcataacttcattcaactcaagccgcttgagagcttggcttgcacaggttcctgtgggcaactagtggctcgcccgggtgcctctcgcctagtcatcagtccctaagaggaaaagggaaagttgtggggctgatgcgctcttcgattcacgcagttgttccctagaacaagtcactcccgctccatcacccagccccccccccccctcccatttgatcatcactcacgaccacgtccgctggagacccttagtcatggtgggggaggggcacgaacttttctaagaagtttcctttttaccaagggagtcacagtgagttggtcacgtaactggctcagagaggctgccctggccccctcccctcgccccctccccgctgcgcttttctggtattcttattaaagcagtagccggctggtgcagaaaagcaacaagttccccagcggtcttcccgccctagcttgacaaggcgaagggtttcttacctggcgacagggaaatctcctgagccgagctcatctttgccagagccccaggtgtgacctgagcagtgggcaaaggatcggcgtgcaaattggattatttttatgggggtactctgaaactccctcactttctctgggaactttttgtgctagggctcagtgacaggcgttgagaaagctgcttcaggaaacgcccgctatatagcagggcaattggacagtcattggtaacctcgctcattcattagaatcacgtaagaactcaaagggaaacgtgtctctcagaatgagggcgtttgcgtaaatctataggtttttcaacatcgatgccagttgctttgtcttctgtagtcgccaaggtggatgagagttgaagctttgcggatattgcgaagggttattagattcataagtcacaccaagtggtgggcgatccactgagcaaagccgaacttctcacatgatgacttcaaacaagacacattaccttcctgcatctgttggggagacaagattttaagacactgagtctccaggacagcaaagccacaatggtgagtagcaataaaccgtgcattataattgaaaaatcttgacatgttgcctaacaacaggcatatcatggctcttcctagcacttcacacgccaaagaacagcagctattcaggccaggggaatcgggtttacccactgcaagtttaattggaatcatttgagatttaacacagcagtggggaactgcgtggaacaaacttggaactggagggggttgttatactggctgttcaaagctgatgcttgtctgacaaccgtcttgtattccatcctttgctttactgtatggtgtgtgagcatattgtatgatttatatgtgggcatataattgacatccgcaagggggttaatttcaatctaaaaacaataatgttattagtttggggctggggtggagagggtaagagtgggttagagactaagagtttaggtgaggatagtggtggagttgggggcgagaggaataagtcagaagtgtctatctataatgaaatgggtaatgctcgcatacgtggaaagggtctcatcaacatgtgatcaactattaacaggatggctttggcaaagccatccacacgtgacaaaacgtaaggaagtggaagaaaccgtctagagcaatatcaagtaccacttaattagagaatatttttttaaccttttcctcctcctgcgccgggtgtgtgatcccggagagcagagtccattcagcaccttggacagagccagcggatttgtccgaggtggtagtacttcatccaggtattcttttcctcgctgtcaagccaacccggtgtcgcccttaaaaagcgtcttttccgaggttcggctcacaccgagatcggggctggagagagagtcagattttggagcggagcgtttggagagcgagccccagtttggtcccctcattgagctcgctgaagttggcttcctagcggtgtaggctggaatagactcttggcaagctccgggttggtatactgggttaactttgggaaatgcaagtgtttatcaccaggatctagccaccggggtggtgtaagccgcaaagaaggtaagcaccggggcggggaccctgcatccccaattcttgagctattttgatactcgatcttccggaaaggacgcgtagtggagaggaggaagtggagagagagcatgagaaatggttgtttcttggtatttggctagtttaaattgacctaggtgagaacctggggcaaatcgaggtggaggaagctcaatcttcctgcggatataatgagtttagttaacttggaactgcaaatatctgattcaaatgtaagatttctctcattccccctttccctccctcttttccgttctttttgcttgtgtgtggtgtgtgtgcgtgtacagtagattcattactaattatgaagctttttacacaacattcgatttcctaagatttgactttgtaccatttagaacaagaggatggagggaatgtgcagtggggaaagaggaggtggaagctgggagagggacggaggttagctaaatacccacaaaaatgaatcaaggtaatttcagctcctctagtgaggaggattcattctctcggtatccctgcctccctctctttcccccctccctacctccttcccgccccccttttccaccccgccccctcctcctgcttccatccctccctcattttctctctacctctccatcgccctcacgatcctcgatggatagttctttatgtttgggtgattttttttttttacccctttctatcatccctccccgagagttccgggtgctggcttggagggctcctgcttctcaagggaaggggggccgctgagactgcgctccactccctgccgggccggatgcttcattgagcccaggtccgagtcaggcggggtaactcagggaggaggggggtgctccgctccggagtggaaggtcctttctagatcgaagagcccgggaacggcccggggagggggcctgggtggtttgtggaggtggagaagaacactcctagctccgtgcggcggcaggaccgagccaccaatcagcggggcgcgcagaccgcccagccaagcgaggttgtgtccactgacgcgggtggagggcccgggctccccgccgagctgccgccactacctgggtggcctggtagcctagcagggagtgaagatggagggattggagataagctagactccggctgggagccgcccagtcttttcctccaactcccctgcccccgcctgcgcccccaggggactcggtgcgcccggagcgtgccactgcgctgtcctccagcctctcttccgggagttcagggacttgcgtgcccccgggcggggggcggggaagacctctccacactcttacaaccccccattcccaccgcttccaccgccctttgttcaggccaggagctttgccctgccgcagctttcggagtaaggcttggtgccttgggacccctccccggataaggcttgggatgcgggtgaggggcgttattggggggaaaaggaaagatttccaaaactcaagactcaagattattttaatgaacgaaagcatcccaactctgcgcaggtggaaatgatgaattcatagacgatgctaggatattgtggaaatttgggggggtgaggggggtggagaaagaatgaaaaacaggcagttggatcagatgactgcccataggctgttcgccacacaaagggagcgtagggcagggtttacggatcaagcctgcagcgaatggggcacagacagttccgggatccaggcgttttctcagtcagatctacgcgaaaggagcggaggggaggggccgggagggaagcgtggcgggaggggcagggcttgggggcggggggatttcggatcagtctgatgcaattccaagcgtgctgcaaaggaactccaaggcgcccgcatcaccatcgccacccacccttcccagatggtgctgttttaaatacggatctgcagggctgaacgcagaactgggagatttattgcaaaatcctgagaaggggggccggggacagagaaccaagggacaaaatttaaaggtgcaacgcctgcttttccccaacccagcggcaaccagttggagggatttttttttccttccttctttctttctgtctgcctgtctttggatctaattcaccaaggaataggtgtaaatattatgacattttgagaaagcttaatggatagagaaaaaaataatcatctgtcattctaaattgcagagtttccctcccgcgccatgccttgctcgtgaatacttggggctgcctaatacagttgctagggctttagacgaacgcttcgttaagggaatattgtttttagtccacttgccaatttgtctgacagttgaacagaggaaattataggtatcatgtctgggcgacaaggagaaaaaatacttaccagcctaattatttaacctccattttttttaacaatttaaataagcctcaaaagtgtcacgtcatcctcttacacccaagcatccttgacttgtaaggaaagatggtttccactgtcactttaagaatggtgcccctgatattcactatttttatgtattaacatagatctctttaacgcaaaagcaaaggtatttcaactgccctttttggaatcagaagattaaagatgataggagatggaaagggaggaagagagggagagagagagacatttaaccttataatcttaatagtaatctagcctacttttgtagcccctggtcttgcatattaacactgtaggtgagatttttaccttggtctatctccctcagtgaaatatataagttctgaattagatgaaaatatgatgtgcatcttgccagaatctttcccagtatccttgacattaagacccacaacacagcaatttttggaggacagagaagaacatctgaataggctctgcaaactgccactccagaaatgggcctcatcagtataccatcctttttacatgcagcatttgtacttgattgaaccagagtccttgctaattaaaaagatcatctcatctgtacagtcaaggcaggaaatgaaggttgttgtgtttttttttaagcaagcgattaattggcttgctaaatattgtcagttatctatcagtgtaaattggagagaagctttgaaaagaagtgggatcaacctgtgtaagccgctgctttcatttgcacttcccctaccaagtctttaaattcttaataagaaaaagctggtgaatttaggtctttccttttcctggcctgtcctctaggggaaactttaataagaaacaatgtatcaacaccagcaaagggagaaagagacaagagcctgggtgaccacaaaacagataagcagccactgaaagtcagaaaattgaattgaggcagttgaaactaaaatatgacttacaaaaggagttttatttatttagtttttaaaaagttctgtgatcttggggaccatgttccaaattgctcagatagcattcatttggttgtattgtttacagtctgtaagttaaaatgatgtcttattgaagtgttgatttttcttcctaaataaattcttctacgtaattttttgcttttaattagagcaaactagtccaaccatgcaagtgatcctaacaaatatgaactgatatcatctgatataaaaactctgctgactgaaaactatatttgttctgaacagcactgacttgccagaaaaatatctatttttgtagctttcttttcactctatggataatttaatgagttgcctattttaattttacaactgctacctcagaagtatctcaaattatctttcttttgctagtgtctttctttgctgatctgtcagtgcattgtgtgtgtgtgtgtgtgtgtgtgtgtgtttctagtgggagtttaacaagcagcaaatctcttaaaattacatactgtaatccctataaagaacactgtgtagtagttaataataaaataaacattagcattcagtgaacgtttaccacttactgagtgctctgaaagtggagggggttgccttaagtggagaagattaaatttttaaacaataaaatgttctctccccttctgacttcagactgagcataatatcaagaccataaagccttacatcttttagttgggaatgtagagctgttcctttcacaagtatctctagaaaaaggagacatgttctataagcagtgacgcccctgccccaacttgacacttgggtcaaaatactgaattatcctgcctccattctcgttggtaaggtttttgggggttttgttggtttgggtttggtttggttttttgccaatcctgactccccccacccccatctttcctccctctcttttctcttccattccaacactgtaaaaagaatcctgtaaggagttctctataatcaagcgcacagtttatttgtattttctagtaagaacacttcatggagaattttgacaactcattacaggtttcttcatttgatttccagatgggctatgttgggtggggatcaccatggcctcttacacagggaatttcggtgccaagctgcagagacataccacagtggacggtctgaaggctcggagtctgtctcttccagtttcaaggactgtgcttgttcagtgcccaccatgcccctcagacctatctaaggcctctgagggtattttaggcatcattttctcctattttgatttatctaattttttaaaaaagggatctacaaatactccccaaatttggcagaactaatggaaagttttaatcagcccatgaccttgccttcctaaattcttctttccctctctcaaagttggaggctcaaagaaaacaggaatcttcctgtggctgacacactagctaagtcacagtcactaattcccctgaaaaacaaacacagaagataggtcaaagccaagaagtacattacttttactcatgagtcagagaatctaatggccagacatttgtcagaggtcacttagtccagcccatatccgatgcatgagttcatgctggcttgctctctttcaaccctctggaatttcatcctggttttggattcctggatacttgtttaccttggtagatagtgtttgcctatcttaagtgagctatgatggcatttgctcccagcatatttctgcagaaaattaacagtcataattttattccatatgtattaaatattaatcaattatgagtcccaaactatgtcagaatttgaagattcagccatgagcaagactgaatgatccttatcttgccagaacctataggctggtgacaaaatctgaccccttaaagacatctggatttgtactttcttcaagaaaacacagtgacttgggttcaaagacatagttcaagctttatcctcaactcattatcaataactgaaacgtcaactcagtttctgtttccatgcacatagtacagaaacaatgttctcaggataagttctaaagtctatttcagtgtcatggttgactagtgtacaatatacaacctggaggtggatgaggtatgaggatcacaagctcaaggcctgcctagcctgcagaatgaatttaaactcagtttgtgcaatttaatggttctctgtctcaaaacaaatagtagaaagatagcagggatagttgaaaggtagagcatttggtggtatgcgtgagacccatgggtcatgaccgagcactataggagaattgtgtgcactgtaactatttcccctttcttcacaagaaatccagtttaacttatcctaacctttgatgatttagaattttaaatcactaattttttactttctaaatacatttaaataaaacttaaagacaacagatttgggacctacataggaggtctctggatgtggaatttaccattttttctcaaaaatgatgattatgatagtttaaattgaacaatgaatgaccttatatttgtttagatttattttaaaggaaggatgtggtagaattcccactgtcaaatttgagggcacttttctttgtgacatacatgttctatgttttatgtcatttctttttaaaattaaagatattgcatcctgaaagtgtcttgttcttataaataatgcattatatgtacatgctaatagataattagatggtctagccaggagaaacatgaaagagaactggtaactcaaagcctgcagaaggtgtgtgggcatttggacatccaggaaatgctatagatctgtccttagctaactcagcctcgtggagataattaagaagaaatgtgggtgtcgagagactgcaagccattccctgcgattggctggattgctgcagtagttcaaaaacaattggcacagccacccacactggacatgattgccctttgatgaggcagctattgacttttataaagatgccatatttaaaataacttctgatgcactaaggatgacagacatcactcttgaattctattttaggcaaatggcaaaatacatttcaaagtataaactttttaaaaaaagaataaaccttagggaaattttcttcaagcaagccatttagcaatttgtaattccaaatttaacagttcaacctgaagctggtagaaaaatgtgtcttatatgagatcttttaaactgaaaaggccatttctctggattactatggaaaatagaaatgacctttccaatatttttaacctctgagtgaatgcatataccctttccaaactaggaagcagagcccaacagcagaagaaaaacattgggatcttagtgccagactatgtatcaagtgctgtgatacctagaaaccccatcagagactatatcagtgccaagggaagttaagacagagatctcttcaggttcacagaaatatattgaatatgtacagtctctaagtattaagagctctgtaaactgaaatatcccaattaagtgttctcatgagtgttcacctaagcaggaagccaatagggtaaagcatggctggagagatgaatgcaaaagagagaggaaatgtatagcaatatagaaataatcagggaagcagaaaagaatcgggattgtacaggagctctctgtgggtgtttctccaggccatttctccctggccatgatctctgccttccatgctcgatagttctaattactttagtagaaaaccatgatttccttgactctcactttcatcctcctctgagaacctcttcctctccaatgacttccataatcaatattaaagaattaagctcttattctttatgacatgttgaactaacatgggatttgtagccatttttgtggcatagactcttggcagtctgatgaaccattttgtaaactcgtttcagaatactacttctaaatgaagataataaaaagtttatggttacaaaggaaaacaattgcattacatatagctataataatataaaatgtaatatattgtgatataaaaatatatgcacttttatatattggataatctagcagcaaaatgattgctataattttgaaataactaaccattggcatacaatacaaaaatgtctagcttctgcttgtaataaagtctgcaaatactactgggtaagatccactacacatttgacaacagaacatgtgggaggaaattattaacatagcattgattcagaaatgtgaatttagccaatgtcaacattagccatttggttttcctttctggcaaaggaaattggcattggcagaaaaaaattaaatcagttttaccattagaaaagctacacagtgtgtaaaaggccaattgacaagatagccatggtgtggaatatgtgcttcaattgagctccatatgaccctaatgcataattttagtatcagcagcagcacaattccatggctctagaaatctagtcctcctgtgaaaaggataggaagttccaggggcatgggtagggtatagcttagtggtagagtgcttgattagcatgcatcaagtcttggggtttgatctgcaacatggccacccctgcaaagcagatcttggaattttaagctcgggctattaacttaggtaatattaccctcagaaagctaacaatctttaacaaactcaactgtctgaaaactcttagatattgtcattgttacactgtaggaacattgacagaaattgtgaggtgagggaacatctgtcttacattgaccatgtactaagctctttgctttgcctttgatatatattatttaaccctcaaagtaactcttggagacagattatattctaattatataaacaaggaaactagagcttggggagtttaagtaatttgcccaaacaaacacagtaaattttaagtggaaaagttgaacttcagacctaaagttttttgacttacaagctcattttaaaaccctggttctaagcctagcctgatggcacaggtctgtaatcccactgtttctggaggcaggaaggacagtgggaggaagggaagccaagtattcctgtgtaatgagtgttacacacgccttcatttcatttacagatggtttgcacatgtattctcctaagaagttctcactacatctcttcgaaataggtgagagcctcaaaatcagtggccacaaacactaatttaggatgattttttttttgatttgctgatcagccaatggctttcaagtggttacttctcattttagagtctcattttcacaatcatagaacggagcatggcaacacttaaccagcgtgttaggatcaaatgaaagaatagtgaaacctgattttgtctcatttaatacagtgagcattccaaattactgcacctcaatgaatcctttccatgacaatctctctaggcaaagcctgtcagtgttcatagcttaacataaggaacctgattaatcctttagacagacaattgtgctaaattggctcagccactgtggcaaagctgggctttaacctgtgtctttctaatgccaaagttttcttgtaattattaatctcacctgaaaattcttatacaattttagttgttataattgttgtcatgtctcagacactatccgtacagaattttccagaaataaatatctaaccccactgaattctgaggctcgttacctgcacactcttgtactcacttcggtttattgcccaatggaggatttcttacttctttcttaacttgtttagaacagttccgcatgagctgacttctaagagttattgagtaagaaacgttataaattgtttagattgggatttactgtgtttagaagccatttcataagtttgcctttcctaactgttactggctgtggtactacagatgctctgatggagaacactctctccaaaacacacagtctatgacaaacctccaaaatctaacatattgtttacagatatggagaagaagaaaatggaccagcacagcctgaaacgtaattgcagcctcatagttcctgctagggactaagatgtttattggctttccttgtgcaattcagtgttcttcctctaagggctccactccaaacttgaaacctctctggaaatacatttcatttgggagcatgccaggaatggtatctgggtcctctgtgtctctgcagcacctcagaagggaaaacaccagctctagaagggtagctgagtaggaagacagcagaagacaagaagtcatccatctacttggatgtattcttgataaatttcatccacccttctcctagaaagcagcttacagagacgatgtgattttaaataattgattgaaggcatgtagataaatcttagcacaagtggtcttttcagagatgctaaagtcacatgaggaactaaagctactggtgtctatggaaagaccttattccacttctaccctgatttgagtaaggaaggatgctgaatttattgtacatgcggtacggactgtgaagtcatgaactacctgatgaagtatacctgatggatgaaacatccaggaaagtttgatctctaggtatcaggctggttagtgtgggttttatgtgattggacttgttttattaactttattctaattaggttttaggtattaacaagacagaaatccaaaacctacaatggttttcaggaagtaaaagcctcaaaagtagtgtagtatttcataaaccttattcttcttagagcttgtacaaaagtagtcacccctgaggatctgaaaatagtattccagtttagttaaaagtccacagcttgagatatcaagtagtgtagtgaacatcatttagtcttagacagtattgtttgtcattggatttggggtcagggaatgaataccttgttcaggatctgtttcttttaaaaaaatgcagcacgtttatgctaaggacaaagattcagctttgattcaaaagcttgttcttttataaaaacaacctctcctgtctccaacttccaggggatgatttgtcaatctgattgaatcttcttctcccttagttttccccaacagctgtgttcagataactcacaattccagtgttttctaagtcctggctaatttcccacacatgttgagtgtaggacttcacgttttcagaagaatatggagactttggaggaagtccagagtagagcaatagaagtgatgaatggattggaagttggagtttatgaagaaggttatgaggttcgatatgctatgaaaacggtctgagaggcaatttagcaacatcagaaagttaataagcagctgtccttcatcttcagtaaggctggatgaaatgaaacaagatactaattgtaacaatgaaaacatgctccaagaaggaacttccaagagctagcaatgctagattctagaagtcctgcaaaggaggtttaatctgctatgtaggaagacaggataaccccataacagccctcctaggggctcagtctgtaaagaatttgccccaaagtaagaaggcctgactttgacctctaaaactcacttaaaataccacatgtggtagctactagaggttcagacaaccagatccctggtatttgctgtctaggcagcctagctagacagtgacctccaggccaatgagagaccctttgtctaaacaaccaaggtatttggcactttcaacaggatagattcctgagtaacaacacccacctccacattcatatatatgtgtgtgtgtgtgtgtgtgtgtgtgtttataccttcaaaacacacaaacatgtgtgcttgcacatgctcaggtacacacaacacagatatacatatacacacaccatttccagatctatttttcacaacaacaaaaaactctacctaggagctggagtgatggctctgcagttaggagcacatactgatcttgcagatgacttaggtttggttcctagcacccataccaagcagttcatgactacctaaaactccagttccagagatacctgcacacatggcttgtacataagctcatgcagatacacatacatacacataaacagaataaaagagtttacctactcatatgtcaaaataagatgccgctgataaagatcacttgccccgtatcttctcaacctctctctactcttatttgcttgccttatgaaaacacagttaagcatgaataacaagaaccagggcaatagttaactgtggggtgcccgccctaactcttatttatccctgaagcctcagagggaagtttcttctcaccattactacacggggcagacagatggttatcagcctatatagtaaaacaaacctaaggcaaaacaaaacaatataagttctctcctttggcaaataagtaatggctcttgaactacactataactcatcgccaagactataaactcctaaagcttggagatgtgttttgtttatctgtgccatagcagatagaatggctggcacatgctgatgtccagcaagttatagccagttgaatgaatttaattgtgaagtaaagggaaactgaaattgatggggtgatgatttttggatgattccagatgatgatatgtgctagacagagctgcttgcatgtgctgtggaggcctctccctccccttttgtcatatgcctaggcaggaccaggtcaagagagctgcataacctacccaggtctttcatcacacagttcatttttcaaaggcacacatatcaaaatcccagggaaaatagcccagattcttggtgcacttcctaatatgactttgagaagcaccacaattacttcatgcttttctttcttcatttgtccatggggaaaaaaatgtaaagtttgacaacaggaaaaatctagcttcgactatcacacattaaaacatggttgtatttcaaaattaaggtgacttactcttgatatctgactcaatgtcctgaaacccagtactttaagttagttcatgctttccatggctctactcccagtacaaccaagacacaccatggttagtaagtctagctctgaggtcccaagtccacagttccatgcccttggtgactatgctcatatccagtttaatgagtaaatcaatggctctttcattgttaatctttccatgttttcagggaagatctggtaacttagaggaaggcttaccaataggtgattcttgaatatttagggggttagcctcagcaatttcataatgatttttatggtactttccctgaagcagagaagtatttccagatgggatcatcgtttttcaggtcctccttttcaactctcagtgcccaggccttttgtgcttccttgcttttatctgtccatactgggcctgtcaggatatagaattcctgtaacatgtgttggccaatttggccacatctaagtatagcatggagttatttttatggcctataggaatcttacagagaagtactacccaatgaatacggaaactatttttcccttaaggtatttttctcaagaacagaccttatttaatgattgcaaaggcttgtgaatgacacagttcaaggccaaactagaccttggaaatcatgcagcatggatttgaaaacatccttgtcactctgctcatcggggaagttttctgtttacttactatttccccatgttaattactttctctagttttcaagcagtgtttggggtcaattcatttgataccaaaccttttttttttccccaaagaagagtgaaggcaggagtaaccaagaaacttcaataaacacaattaaacataaaatgcttatagacatagtaggattgacctcatccaattaaaattattaatagaataatatgtcagtatcaaatctgatcctactgcctctgttcccacttgggtaatgaggattagtttgtatttcctgacaagaagagatgggaagtcacatttatgcctcacttttgtccccttgaaacattgagttgggagaatattaggcaataaaccaaaggaactaagaattagactcactcaaaattaacttttaatctccgcagtaatgacatttcttttctccatagtttttttcttcctttttagtggtagagaaaacattggcatcaaatcttagaaggaatttttgctcccaatatcaatcttttatgtcagaaaccaaactgttagaaaaaaagataatgcctcatttaatcaagatttgcctttatgcttaataggacagtaatctactgctctagcaggcacctgcagtacaagatactcacaagtccaagtccaaaatgagtttgagctaaatagtgacacctggtcaaaaacaaagagaagaaaaatcttttttaaaaaaaacatttgatcttaagcccccaaaactagttgaataagttatcagaatgaaaacatttcagaagaattcataacttcctataatgcacaggccattgatccatcttggctctgatgttcttcagtgaaagggaggggaaatttttatggcaaataggtaaatgtcacaagtctagtctcttactgtttgagtattaccacaatcacaaatcagaaagctttaaatactcaaaagtgggaagaagaagtctacttgctcaggtttatctgaattggtacttgatcttctatccccaaatactcctgcctttctggctccttctttttctcagtgaaaatgcaccacccactggaaaaggaagacacaagcatttatgtctatggtgtcaaaggagagtgagactaacaggatcagccatccaatcagagtctcagggtgaaagcatggttccaccctgaggaagtgctaacagggtaatgtaagttccatagtatagagatctgacataatatctacctgagcagcaacacaggtgctagcaaagacatttgcttgcaacagagtttttggaaaagaagtaaattttaacaggttacaaaaccctgggggcaaaacccattcctaacaaatgtaaagttggaaagtagacatttgtttgaagctgatttaaaattatttaccttttaaaattgcaggtaggactcctccagtcctttttaaagatataccagtagctttaaagattgtaatatagtcacttaagttatgatgatagaagaaatcatggttatattcagcctataacctaggaagaaacagagggtctttaaggtggcccaagcctagcttcatgccctctatcatctgtgttgtaagatcctttgttttgatcacatgctccaccaagttgtcagtggggcaaagcgaactgtgagtgacactctgagagtgtgcatatatttgaatagcctgactatccagagcaacaatttgtaaggggactctaaagtagcttgagttctgatgatttccctttactgaaggacaaagggtagaaggaggaggcctttctcgcttgagcttttgaggtctttaagggtggatctctggtattcttggttgaattactataaggtattgaatctctggttcttcacttataaaacagaaagatttctgtcagcaggttttggaagctttcaaatagcaaatattagtaatttcactttgttaaccatcagcccttggtaaatgaatctcagtatacactaccgccatatattcagtacaatagcccactctggtgacaacagacatctgggaaaaagaactgttatgaacctcctttcctctaggaaatttaatgtttaagcattcagatacagtcatacagcaatgccttaacaacgattaagtcattcagatttcacaagcattcacatacaaggggtcacagaagttggggtgcaagagtctcggatacccatttttgcctcctttctgagtcacatatgccaatttttcacggtgacttgaaatcgtctgtgaatgaattgcttattacagtgctaatcactgggccctgtctcagacatactaaaggccagccttagaagaaggagcctctcttttaatcctcagacaggtgattatgttaacaagaggctgtggcaccgtgctcaatactgccctcttgttcttttatatttttttctaaaaaaaaataaaataaaatgaataataaaggtctgtctgccctagcctttacttattggctggattagaggggcaacgtttaacaaagcagcaatccaggtagacacttggcagagtttatcatacagctaaatgaaagtagccctccagaacctagtcatgtaactgatctctcataggttaaaaaaaaaatcaaacaaccaaacaaaaacggtccaaagaccactctctgctctagaggaagggggcttagtgagctacccacccctcaccctaaatcctggttaagtatatatacatatatatattgatgtgttgttgctgcctagataatgacaggcttggcttctgtgtgcgtgaatttgctaggactggaagtgaaaacatctacaaagcatgcaatgccctggaacggaattcttctaataaaagatgtatcattttaaatgcgcggaattctgattctggtaattcgtgcactagagtgtctatttcgaggcagaggaggtatcatatgacagctcacgtcaaggcagcgtggagccctctcgtggactcccacccactttcccattcaccgaggagaggactgctctcgctgccgctccccccacccacccccggcgagctagcatgaaatctcccagcctctgcctagatcaaatggagcttctcgctgaaggcgtgcgagtattacctccgccatgcaatttccactatcaataatttaacttctttgctgcagaacaggagtacatatcggccaccaaagactcgccccctcccccttttaactgaagagaaggggaaatatatagtaagagtctagaaccttggggaccggtcttccccagagcagctgccttgatgtttactttgacaagtagtgactgaaaaaggtgggtttcttttctttctctttcctcacccccccccccgcccccgtttggtctgctgggaagcatatggctttagtgaggtctgttattgcctaggcttcccggctagaagcagtaacttggtgtaatgctatccggggttattcattaataaaaaatactgttattatcttgattgaattctattaggcacactccggagaggtcagggcgcaaactctggttaagccgatgtgtttaaggtagcggagtaaaccataaccccgcacactctgtgtagtttcattgtgtgttcgctttttctagctttgtggtgcgggaaggtgcgggaaggtgtgtctggggccggggcctgggggtgggggtggatgcacgccctctcccacagaacttgggtgctgggatggaaaagatggggagagttgcaaaccaggggagaaagatttgaacgtgtgagactcacactcgcttcctcctactctagagcacattgcggggagtagggtgcctaggaaccgggattcgaccacccctcctagcaaagggcaccctgcggagaccgcagagggcaggcacagagctttgggtttaagcagcgagctccggggaaatggagagaagccagtgcaaggcgatcagggataccccgagggcttccgagggcttccgagggcttccgagggctgagcccccgcaaggaaaaggcgcgtcgtcccctttaagcagccaccccaatgggtatcggtggcgcggcggagcagggaggggataggggcggcgctgtctgaccaatcgaagctcaaccgaagagctaaataatgtctgaccccagtgcctggctctggctgagctctgggtgcccgtcgctgctgccgtgccggggcgcacccgctggctggctgtcgcacggttcccagtgcgcccgggactcccgggcttggagaaggaaaccgcctggggcggcgcgccacctccgcctgggaggctttgatgagacccggttccttcaactgccaccactgccttggggcagacgagaaagcgcacggggcccagggcagggcgcagggaccagaagcgtgacaacaatgtgactccactgccggggatccgagagctttgtgtggaccctgaggtaggcgactgcggggcgtggggctaagtgcgagagccagaggcgcgtgcgcccgggaaagttggctaggggactgagaagttgtgggactgcagaactccggcttcaccttcgtcccgggacagcggaggggcgggcttgctcctggggagcgttctcccgggatcccacgactctgagggacagtgcgaccccaggaatcccttcagtgtgagagaaaaagccaagggaagaggacgacttgcgccatgggagctaagcctgcgtcccggggatccccgaagtcctcccgcagacgaggaagggtggtgagagagatatagagcgacagctgttgggggctcagacggatggcaccgggacagggctgggatgagagcccttaccaccggcttaggcactctccacgcaaatttggaccggggtggtgtgtagtccgagaatgggtcttggcgccttctgtcctcatctcttttcctgggtatcacaacaggctgttcactgtcacctgctctctagggagtactaccaaagcttacttacaggtccaaggtcaacgtttaactaggaaaacttgggacccttcttatcgctggggcctgaaagggtctgcggaactccaggacagcctgtatccgaccctctgtccatcctgcgcacctccctttgggcatcctcctgaggaagtgaaagttttgactttcatccgggagtaggttgggtgtttatggaggatgaagaggctagttttgatttccagggatgctgaaacaggaagagcaatggataagcgacctaagcgtagaaagaaatagctgaagatgggggctttgtgcttgatgacaaggaagaaggggaaattgctgccgggggtggggggggggtggtgttgttccccccggggctgctgagggcggtgagccacaggctgtgagtttgagtttgaactggtgttttagtgaaaacaattcgtgagttgggggtggagcctgggctaggaaactggggatggggacttggggatggggggagccggagggagagagggaggatccaaggaggagggaggggagggccaggagagctgagctaggaaggtagagggtgccctcttctggccacactggcaagagtagctgctggggctcgtcgaatgggggcggggaagtgttttaggggcagttttgctggtcgttatgggggttgcgagtagaaacttgttgagtggcgttttgaaacagcttcctgaagatgtgcggctcggttcggaattttggcttgttgcatttctttccttgagttgccggggtgctttgagataccattgactaagtgctaggattttcttgatcttacttgagggtcttcccggcatcctaaaatatccgtcttctcagcgtcaacaacagccttttagcccctctcacaagaatacaggatgttcttgtctggaagtatgtttctgcctgtttattaatccttctagaacttatcctttttttaaaaagaaagcgatgtataattaggaacagtaattgttatctaattgtatatgaaaggctaaatgactcccccttcccaacaattggatcaacttactgaaaaatatacccctcttttaattcttctccaaaaatcgattcttttatacattagttataaggtcaaaagccattttgatccttcgattgatttttgttttgtcttgttgcattatttatttatttattttatttacgggtttgattcctctaagcatccgggcccctgtaagtttgagacactattttcaggtcggaggtatctgaggttagaacaagagcggttcaagctgttacacacaataggcttagtcaggcgcagaggatgaaataacattagggagctttaaaaataattactgcagttcactgatttttcataaggtttggaggttttggtttgttcttcctcccctcctccccaaggcaagagagagagagagagagagagagagagagagagagagagagagagagagagacttgttgaaacgtaatctctactggaatttgaaatatggtagttaccattattggaattccagaatcataaagttgttttctgttcctcttctatgttattttgtaaaaatgggataaatattggtaaatattaatagtaaatacaacgacacagaacacacgttgtatagagaactgttttacgtcattaaaattttcctgtttataaatgattcaggaagaaagaaataattcccagataaacaagactgttgtgcatgacgtagacatcttgaagcattagaccattgcagacacacttagacataacattttttaaaacagactaacagtaatttttcacatacttctagagtctctcacagcccattcagagcttagtttgtagtttggaatcatgcttgttttagggtgctacttaaggtcatttgaaaggattgcaaacctttatgcatccagaaattaaatcatttaggaaatctggtttaggatgccttgaaagtatgcacccttttaactgcatacaagaggaacctagaaagtgatcatttgcctaaactgcagccatggttgcttaaatctcctaaaggtcccaagagagaaaaggagctgggttacttctagttcatcttgactcgctgggagggagaaatcatattaaatgtaaatgcaaatttctaaaatcctagcacaaagtcttggattttcttttaaagggggcaccattaaaatataagctgttcccagcttcctgtaatgttttaagagtccaattctttttaatagtcccaataatctcatttcttccgaatataaatagctctgggttgtagcttggcacacggagcaggctgagcacgcccacctgatagtatagcaaccagcttgtttttattcttttttagattcatctttgaagcctttagtaaaatccatctcccccttccccccttctttccccacactccacataccctatatgttgtaaattgtagcacagttggcagatttgggttctatagatgttatcttctaatcaccaagagaatctgagatgcacgacatggaaggaaaggtcacacacaagtagttcattaagaatttaaggtgtaggaatttagtcccggagtagagcaaagagcagttgtggattttctgaatgaaaacagaacacagcaagaggagggcagctaaacctttgactgttatggaagacacactcctgctgcagcagttatagtgtactgatctcctgctaatggttaaaacaccagcctgtgtttctctccttgtggggacggtttccgtttgtgtgagggggctcttttggtcctgtgacagtgagtatctctttttaatggggtaattgctcacttgtctcaacttgttttcaaacaattgttatgaagcacttcgtttccactaattgcaaaattgctgcttaattgaaggactctcagccgcctagtgcagccattcagccactggcaggctctgtgagctcaagctgtgaattgcattttaaagaggaatcagaagagagttttgcagaattccaacttgaaaatgctggctgttgttcactggaggcagaaggagccatttgaaggataatcacattaagttgcattatgataaattttctttattaggatggataacatgcccagatgggcatcagaagtgaatgagtagacgtattggttacactctggcctccatttattctgtctagtatggagtaatgctaagaagtaaatgatgttggcaaatgaaatccgtttgtcactggcattggggagttaacccttggaaacatcactaaagctttagtactttaaaacttagggaagtgcatccttaaagcccctccatcttccacttagggatgagattattaatcctaaataattttacacttgatcttagccaaaaggcctaaaagcaataatcctaagtaattttatatttcaaagaattactaaacttccatcactctatcacaggaatatgaaaacttcagaaagttatggacccaattactgaataatggagtcattgttgatagatttaaaaaaaaaatgacgaaactcagtagttgcatgggtatttgaaaattgttaagggggaagggaatgctatcagatcgataggtagatagatagatagatagatagatagatagatagatagatagatagatagatgaaagaaagaatgaattacaagcagtatggcaaatttcatttatgtaagtaccaaagtgcaactacaaactctgagacacacctttggtgaggtaaatctgaccaaacattgtggatggctatggagtagctagttgtcctgaagtttcatttatacatggcctgaagttcaaggatggttacatttggagagcgaggggagtaacataaatttacaagcttcagtggcaggcataataaagtaaaaggttatttccaaagttcccagagagtaatgaatgttatgtagttttccccaaaggttcacttgaaagaacttttcattggttgtcatggtcgtaatgtcctgattttgaaagcttacagaaccttggcgcttttaaatctgctttcatctcagttgctttggtctgactgggattttatgacgaccttctgtggttttgatatgcctccacattttttggagggaaggcaggcaaaggaggatatcctaatttcaatataaccaggaaatacaaaaaaaattacatgattttttttaagtcactgtacttcagattgttctttttaatccaaaatcagtttgtttttttaaatttcaactagtctatatgaaatttgctaagtatgtaatagaaagtcagataaatgtttcaaattaatttaagcagttcattaaacattgaagtcatagtacctactaaagaatttccccagacttcccagtaagtcatcctgttgccatatcaatctttactgcctccctttcttgacaccctgtgcaggcttggggagtgtgtgtgaaggggagagggagacaggtaacatttatctctgcaggtggattttaaagcaagcaactccacagctcaacttttacactaacctttaagaactttaacatgctagtcaatgtaaaattgggaatcaaaggttgctctctctctctctctctctctctctctctctctctttctcatcattttcaagggtttatactgtagcactgaatgcaaaggttttgattttgcccttttgccactggcaattcattccactttctgagatataataacaccaaataaatgaagtaggaagatcttaaggaatatctttcatctctgatctaattttaactttaatgatttgagaagatttaagaataaaatagagggtggtaagtagagtgggagttttaaacactattctacccaccttgcacccttccccctcaaagtaaggaaaataaaagaggcaacaagaaatgataaagatcatctctacctacgaataagtagcatcaaaatgtgatttaaaaaaaaaaggaaccggtaattataagttgacttaaacttctccccagtgacaaaactttatgttattgattagtagtgtacctctgcatgattccacatcagcatcagaacagagcgagtcttacccagacacacttgataaagcgattgaaggagcagatagattcattagcagttacctgagattctgagttgtcaatgtagttgatgaaagaatttaatgtgaaatttaatgtgaaaaaaacaaggtgatcaacgtttttctggcagggagatagaaactggaggaaatatttgataatatttattttccccagcacctttataaaaaccgtttataaagttatagaacttcttgtgcataatttgcttcactcatgaaattatacctggaaaatttgataggttaaagttgatggagacagaaactgcaaacttactggtggaattttttagtgtcttcaagttttaaggggcaagtggagatgctggtccctgtgtattttagggactgaataaagtatatatttaatgtgtgccagtttgtagtaagaaagaacaaacatcattgtaaccaaagaaagtaactgcactctggatgctttgtgttatccctaggagcaatcagaaaacattcttattcaggaaaaataaaaaataaaaaagaaagaaagtatccctccaccccacccccaactccctaagaaaaggaggacagatttatgagacaggaaagggaggctcattcagtaatttttgccacctgctaatcattcctgtattcagagtttctgtctcagagattatattttctgtgggctcctatgcctttgaaatgtgaaactaggcccaaattgaaacaagtttctctatgtttcatgtgtgcacttatttcttggatgtgattttaaacatagactactttctgttatatcacatagaatctaaaggtcgagaaatctacaatcgtgatgctgaagggagatgcttggcagagtcccaggccacattcctagaccaaaggctccaaggtgttctctcttatgcaacatggggaaagcacacccagcacgaaatgttggctggtgatgtgtctgaaggcacagacgatatgcttatcacatcaaaacataaagccaacaggcgctgcagacattctgctgctagatagaagttggatcatatatatttatttaatggaaaatagtgtaattaacttctgtgtgtgggtgttgtgtgcatgtgaattatatgtttatatgtgcttgtgtgtggatgcatgtgcacatgtttgtgtgtaaagaactagaggacaactttaggtgtcatttcttagggatgccatctgccttgttattagagacgaggtgtcttcttgacttggaacacacccactacactaggcttcctggtcacagaactccagtcatccctctggttccactgccccagtgctgggattacaagtagatgccattgtcctttttgtatggggtctgaggacagaactttttggcccttgtgattttgaggcaagtattttacaactgaactatatcatctcagctagtttgattttttaaaaactcagcagaacagaataggaaggtaggggtatgaacttagaggatgttaatcaacagatgtcaagaaggagaaatttgggagttttaaataattgcacattcaatgtaagaccatagtataatccggagctgtttatagagctagtgcaattttggccatggtagtagaagtataatgcacaaatggagaaaccaataatttgcttacttaattttgaattcaggaggtgattttgctcaaatatctatgatgttaagatatatgttatgtccctgggcaatgcctttataactatgtaagtacagcgtaactggcatcaccaacttagaaatatttagcttgccaacatgcaaggaagcacatattcacataattaatttgtaaattttaaaaagaagaaagaagaaagaggtggggagggactcatatgattagtaaaatataaatggtctggccttctatgtggtaccagacctatcgtctcgtgtctcttaatttatttatttatttattataattatttatttattaatctggtctttgaaacaaaataaaaaagacaaacatgtctattatcctctaatttcatgctataaagcctaaaaagcactatactgtaccattcagcaaaatttccctaataagatcataacagggccccagtattgggaagaaaaacaagtaactctggtctagttggagagcatgcatgtagcatgttgtctcctcccctcagcctcagctgctctcctagagatccatgacactctgcttcataaaaccctcttggaaagcaacgtgttctcagtcagaaggcagtaggtcagtagctagaggtccatagcagggtagtcctgggattttattttattttttctgtttgatgtcagtctcccaccatgttttacatcaatttcctgtgttgagagttacatctgtctcctcattcagagtatgcagaaagcagtaagctgggaggtagatttcctttaaaaaaaaaaatcttcaaagcttcccattgtagaattttggaaaatgttgtttatagtggatggaaacacagctgacctacctcgttctttagggtcttcatggtcctggcaatgatttccttgatgactccacaccctctggttgttcttttttcttttctttttttttaaatttatttatttattcactttacatcccaatatcagcctcctttctcccagatccttcttcattcctgtctcccctctcctctgagaggagacccccactctgggtatcacacacacatcctcaccccctccaccttggttgttctttataatcaatattttgcaaaacctaagggttcccacattacttataacctcacatctctatcactatgccccaaaacatacatgcacacacacacacacacacacacacacacacacacacacacacacacaccttactgttactccagcgtgtcacagagattacctgagttaaactcagtgggtcataaagcaaaccaaaaaatcatgaatccagaaaagaacaggtattctaagggagttttaaatgcattttatcttactttttggtaaataaaaacaacaacaacaacaaaaggaaaatggatataggatttggggcatatattttataaagctggggatttgggcgagtgaaatattgaatatataagtaaaatggacataaggaacactgattcccaaacctggtgaccatcagaaatgcctttcaaacttttaagaatataaaggtgaagtccttgaatgcaagactgagcctgggtctgtgctatgcttagcaatttgcacagttgtctcaaccatacagaaacacttgagatccttaaactagaagccatgtaagctgaatagcctatgatttacagggacttatcatttatttcattgccaaattcctaggttagaacatggctagaaaagatttgcagctttccgtataatcagacattcagaggctctgaataggaggccttctaaatattgttctgacttagaaggaatttctatcatagacttccaaagaagagacaaagatcaaagcctatattcctgagcccagtgttggagttggcctaccaactactgagtctgtgatcccagctagcttcttactctgcctcaacctcttgagagggtagtgtgggattaaatgtgttaatccatgtaaagtttagactggcacttgacattaccactgtgctgcattcttagcacttcccaattctagaagaagaggttttagaaccttgtcatcaaagcagcaaaatgtctccctggcatgcttcatgcctaagtgagctttactttatagttagtgacaagatcagaagtctactctaccataattctctgagtcgaatttgtttattgattactctctccacatacaattataccaattcttcaagacccagcaggaattctgtttccactaaaaaaagcctcttgtccatgataaatctgctttgactgagttgttttctgcatctcagagcactgtgattaattgtataatcattaaatcattgtgtatcgtgtctgtgtcagattaggtgttagaagttttggaggtaatgcctagtttgcaaacacgatttagaacatcttagtgcattccattttcttcacatcacagaaatatttctgaaatagaatttgcatgaggtagcccaatactagtgccgttgctgggtctaatgattaaatttaatccaacataccactgacttactcactgatcttaagaaagttgtgtaagtttttgaggtctacaaatatgttgagtcacaagtgcaggtccctcatttcattgggaggtgcacaagtgtgttgtgtgagttagccagcgtagacacagctggacccaagaactgggaactttacatggggccctcagtaatcaaaatagaagggaaggctctacttgcttttactgggttccaagtagctgatttcctgtcccagcatctggatgttggtacaaagttagagcactgctagtagaccccaggttacagcaccaatatgtggttatttccagcttctttggaatgtttcactccgggaaggtgaggaaagcaatgcttagattttcgtgattagtttaacatttcgggacagctttgaccatccgtttaatggtaaatctgctttccagatgactgtgcatatggagatgagaaggggttttggaggagaggtgctttttgaaagaatggtttttcgttcagtctctaatttggggtaaatggtccccagaggacaatttttagaaatgtttgaagttttccatctgattttgaaagtcagttggaggccacctgtgtgaagagggcacttgctccaacaactatactgctcacagaataaggactattctactgggtccttcattcatcataaatctcatggttatatttaagtctgggttctttcttctatagctgcctccctagttgtcctggtagaatttacagagttcaagatattgaggataatcacataaggagtcctttaactatacgtcttcctcttgaagtctctctgtataagtttgttcttgctttctgtttgtgtttatattctttctttggcaagcttacttttgtattattttagtgacttagatactctgggaaacaagtcgtagtcccctccgctgtttgcccgttgcttacctctcattctagcattgtgtgtcataacagttgtttgtagagttgccccttacaggtcacagatcccttgcccttatactggttgtttttcaaaggagcacagaattcagaagggtcctactcttactctcactgcaaagcagagttgaggcacaggtccttacatctgtccacctatgggtttgttcaagttcctttttttttttaaatagtcaaatagctatttaataggattaactttatatgaaatccaagaggaaggatcagaattcatgtttcacattcctaggttccagtcatgaccttctactaacttcttccagggaaatgtaccaaaagatgaaatgcaaaactcagactgccaggtacaacaacaccacaccagtgtggatattggtctaaaaaaacctgaaatattaagtatgtctgactttcatatttagtgaatgaattggttacttagttaattttcttgagtcagagctttgtgtagcttaggttggccttgaactgactgtgtagctcaggatgaccttgaatttttgatcttcctgcctctatcccccaaatatggagattatcagaatgtacaatcttggcctaggatcagtttaaaatttatacttaacttatttacataattcaaatatcaaaatagtgtaaaaaaatcagtatatacaaagaattctgcctcaacctgcacctaccctacacacaacacctgtaattgccattagtatagaactgttttcaaactagtattgtccgctttatagaaatataagcaaatatgactgtgattatcctccctccccccaatttctaaaggaaaagtgacacactgttttacaccttggttttagacacttagcgctgcattccagagaccttttcattccagcttacaggggaaagagcatgcacttcatagctgccagaatctgatatgaaggagttactataggtttattttcttatagttgaaaactggattttttttctattatatacctttttgtattccataaccacatatgtggtatatatgtgcacacatgatgtctgtatatgcatatttgtccctgtgcaattgtctgtacacttgttcttaacagtagaactgctatattgtaggaaagctcacttataaatttgatagttactccataaaatgttctaagccagactgcaactgtttgtattcccactaagagtgtatgggagcatccttctttctgagaagtccatagtatgttccaataagatgagaaatagatagaaacttccaagtggacattgaatcttttattttgtcccaaatttttcagtgggactatgacacagtggatgtaatgtctcaccctggacatgggtttatgccaactctagtaacacacatggaatggacccatgttgccacttgcagaattccctgtaatggaaagctaagaatacattcattattcacctaactagtgaggttggctccaaagaactcagctgtttattggaacagaaaagaaaacttttccaccatcatgttctgtatcccaggtttcaatgttcccttttccgttaccaacctcatttccaagaccaacttcaagatatacacctcaaggcatagagaagtcctgcttagagcattcatacccatgggatattcttttgaggaataattttgtgcttcccccaaagtttataattagtatcttatttatgacaaattaaaattccagagcacaatataaacactgacctgggctgcactgtcagtatacttcatactcggtgttgccgggcagtttcttgcattatgcaagtagggaaccatatgaaagcaatgtgatttatgacctagataacatcttcacgttgtgaatggcattcatcccaggtcatcctcccataactcttaccgttctcattggattgattcttggtctcattcttctctgaggacagtgtgccttatttagaaaaacaaattctgccagtcctgctgccctaggagaatgtggcaaatgaaccgtagcagagcggttatccgatccaagtaggcattcacatatttatctccttacttgtttgcttgcttatgagacaggaccacactctagctctagctggcctgggatgctcgatgtagaccaggctgactttgaacttgtggaaatccttcggcctctgcctcctcactgcttgaataacaggtgtggtaccatgcctgacctaataaaattttctaaaatagaactttgacagggatttgttaaagggaaaatcattttctttccctctgtggaacagttgaacttggacagttgcagtgatgagtgtgtctggactatacaagaaaccatcctttggtgtataagtggacttccaaatgccagctgagacacagggacaaagacacacttgattttgttaatgacacttgcaaagactttcacaacaggcatttccagttttgttctcaagctcctcaaagctgattctctcagtctcctctctcacaagggcagataatggccagaagcaagatgttctaattgtcatctaactcaacatacacatttaggatgtttgcctcccaccctcatccctgagagtactcttggccccaggctggaccatctcttctgccacctttgtggttttcattacttcttgggaatacatctgagattgccttagcataattttctttctttgcatatcttagcccctaggctacaatcttaaaaagtagtacaaaggtcacaaataaggtgccatatagtattagacatttagacaagcaaagtgttacgttacaagcatatttttttctttttttttattacgtattttcctcaattacatttccaatgctatcccaaaagtcccccacacgctcccccacccacccactcccacttcttggccctggcgttcccctgtactgaggcagataaagtttgcaagaccaatgggcctctcttcccagtgatggccaactaggccatcttttgatacatatgcagctagagacacaagctctggaggtactggttagtacatagtgttgttctccactacagggttgcagatcccttcagctccttgggtactttctctagctcctccattgggggccctgtgatccatccaatagctgactgtgagcatccacttctgtgtttgccaggccccggcatagtcacacaagagacagccatatctgggtccttccagcaaaatcttgctagtgtatgcaatggtgtcagcgtttggaggctgaccatgggatggatcccgggatatggcagtctctagatggtccatcctttcatctcagctccaaactgtgtctctgtaactccttccatgggtgccttgctcccaattctaagaaggggcaaagtgtccacactttggtcttcgttcttcttgactttcatgtgtttagcaaattgtaccttatatcttgggtattctaagtttctgggctaatatccacttatcagtgagtgcatatcatgtgagttcttttgtgattgggttacctcacattcttacttcagcagagttagcagagaagcatgtggtaacagtgttagtggtctataaagtacatggttctgtttcagtgtccaaaaagttcccagggggaaaaaatgtctgacacctctaatgaattaccttcatgtcatgtataattttgacattctggcctgataaatatgtagtatgactggcaccttaagggaataacccattaacaaagaaaccataaggttaaattcagactccatagaattagacttcaaacacatcatgtttcagaaaccctcatataggattttgccgaagtaatttaaaaatgtggaataccaagactacattatgtattcactatgtagactttcaaaattgaagacaccatatccacatttgaatctattcagaagaaccaggctccatctccatcacgctgggcataggcaaatttgatgcatcttcctgtgtctcagataccacagttgtaaactgtggttagtttgattgcatggctcatagttagtcagagttaactgttgagttgtcatttttaatgcaaaaagtagtttagtaaattcttagtatttatatagctgcccagaggatcttctaaagtccatctccacccacatgacgactaccaacactgttttttggtagtaggtagaaatagagtcatcacatcattacttagatgaaatatgttgatgtgagtttccatggaacctctacacatttatatttggtgaaaggaaaaaggagaggcttttaccatcctgctacttgcacaggtttgtatacttccatacctgtgcttatgtgggagtggcattttctgaccagcagtacagactgctttttatctgagatggtactggttttcttatatttgttagtagttcagaacacaatcagtatcttgaatatgacccacatggattgtgacacagtgtacagaaattacttacacttacacctagaaatgttgctagctggagtaaggcagtgggcagggagacatattttatttttcctcccacattaagctgcaaataatgagcgctttcctgtgcatcacagtaagcaattaaaagaaattatagagttggatgcaagcataacccgaaggacaactggatgtgtggaaccaccagttttctccatgtgctcaggctaatcctcattaataactcagaaagttgagtttctacagaatgggttgcatgtccatacatgttttggcatctacccacacacttttatgtggtatgactgtgcatcccaggagaaaggctgtggtgtgtgtcgctgcgcctcagtggagccgaacaaactgattgctgaaaatggtgtcgtaaaggtgagcaacaaagaactaataaccttctcttgctaattttatctcctccaaccctgggacatcgtgatagtaatttgaaaaggaatgttgttcttctgttgctagggacaacttatcttcctccacatattttttttttaacctcagtttttaaagcttggtgtttgtgtcttcaatagacagggtctaatcaatagtcatcccttgcttagacaaaacatacccatccttctgaatcaaggatgttcaaggctacagggtttttttcctaatatggacttaattatagacaaatattctttctgtattgggaattgtgctgatagccaccagaatatattggctatggaaatttcaggagcattatctggataaaggctggcaaggacaagtctctacgacagctctagttccattgggtgtgcagttgtatggcagtggtcttgggtgagctgttagctctctgcaatggcaggaagacaggagtatccagcagtactctataaacagtttgattaaagtagctaattgtgaaaaaaagaagaagaaattgaagcaagacagaccgccttgacttcctttttctgtttcttttgttttgaatttctatgaaatgtttctagtcgacacaacagcaaacaatactgcttaaaggggattcccttcatcctcagatctaagagttagcacacattcttcccttagggaaacaaaatgcaactgcattcatcttgcttttggtgaagggcacacttactctttggaggcaagaagacagagcttatctttcaccgtatccgctgcctggtggtgtgcttgaatataaactggaaaaggcagtcctttagcatgttgacatctgtgcctttcaacctgctgttcaaggtagaactcaacagtatctgagacaccacctgggaaagtaagacagtgtcatgtctgccccataaatttgcacacagtagccaagctgccaggcttcccagctctgagcattcattcatatgcagacttgtgaatctgctaagttcttgatgtttagaatctagcaatcctcacaatcttttgtcaagagttcaacagtgggctagtctccagttctggttacaaaattgtttcgacaactccctcatatttttgttcaattccaaaaatgttaagcatttctttcatttttaacttttaaaatgccatttaaggtacttgccttgaagcaactaatttcaaatattagatacttaccaagaaattgtgctgtctagttactagtcatctgttttagagtccaactgaagttgagaaaggattcttgactcctgctacatatacatacacatgaacatacacacaaatatatactatgggtactgttgtcactgttttagtgaaaccttaattatatttttaatttcatggtctatgaaatgtacacatggtatgaaaaagctgaaatctgttggcttcaggaccaattctaaaattaaaaaatctgcctgagtgggtatgttctctctgcttctgactcccctttaccacttcagaacacaaaggaccagagacatctggctgaaagcaatttgacatctggctgagtgcttggaaatctactctcagatctagttagtcatgtcatctccagtatggttctcattgagtgggtgatatcagactgtgcgaagtgattaggagagctaaatgtgtttgcatttgcctcatagcacttgggaaaaattagtaattgaatagcagtccagatttatatcagtggtacactacaagtgctcatgtaacaattcttatttataggtatcctgtaccttatagtatggacagaataaaaaaaagccagttgacaaaaagagccaaagttttacttaaacccattacaaaatcaacaaaacacatacagtgggtgttgagtcagagaggagatgacaggtaactccatggcatactgagaaaggaccatagtgctcaccttgatgtcgtccacttctttccttatcttccttgactgactttctctgtatgaattactcgattacatctcagctttgatgagtttataaatctacttgaagtatctaaatctagctgaaatgcaggttctggtactaggtaggatacctgggatgagagagagaaagctgagatgctgactttctcatgagctccttggtaatgccaatgcagcttgggcattgatgacagctttagaaaaaagcaaggactcatttagtttgaatacattgaattttgtcccatctctgcatttcctacaactctaatttcaggtcctacaaaaatctcttctttttcttggagcaattttcttaacaagtttctattattactatatcattatttgaatgtacaatggttctgtatgatttcacagtcatgtatgttaatgtgggtacatgggtactatggtgtgtatgtggaggtcataggacagccctgagcaattgtcctcatcttctacattgtttgagatgagatctcatcactgctgcatataaatgctaggctggcttaaatgcttctggtgggtttcctgtctctgtctatcatcttcccatggagatgctgaaattaccaaagctcacacaatgcatatggcttttacatgggttctgaagagtcaaactcagatctttcagtttgtgcaacaattgttttacttactgagctctcttcttaggcctgtactgacaattttgaattgcattaatagcaataagtgttacctgatatttgagactttagactgcataaaattaatttcaactttgaatttttttacataaattcaaagtatatatttaaatacagcttagttgtagtttacttgcatctaagtgatgctgaagatgtttttacatccctgtttactttcaaagccatcatgctgtcataaaaatcccacctatggggctatagagatggctcagcagttaagagcactagatgctcttccagaaaaaccagggtttcagttcccagtacccacatggtgtcttacaaccttggaacttcctacttccaagggaattaaatgccctgctctgacctccatgggtaccaggcatgtactcttggacagacaaacttgcaaacaaaacatctatacatataaaatagaataatttttaaaattccatccatgattacatatagttgatgaacatctgtcattaaatatgatattcatgtgatgctacaggttacacattacataattagtcaataacacataatgacactaattgaaattaataatatttgtctaccatgtacaagaatttagtaaaaaatacgtggttagggtgaatagtaacaaatcctgccaggattttggaagaaaataaaatcctaatttaaaacaattttagttcttgattgtcagctgccagttgggccctataattaaaaatagctgttccggaggatatttagaaatgcacatttgatatgcaaatgagataggaatgcttggtactagggctcatttgttagagtcatgtactgcttaggcaaaggagaagggcaggtaggaacaggtctcgctaggggtcttcggcattcagaaacctccattgattgtgggaaacattaggttgcctgaggcgatgttaatggcagtacttagaacctctggaacttggcagctgtgcctaagactaggatgtcaaggtagagaattctctgcccagagctggtctttctattagatcatttttttactccttcccaaatccaaggaatcatttcagctgatactaaaacttatggttcatactttaactaaacttccccatatatcattccaatagcaccagcataaacattattaaatcattcagtagctagagagtccagttgacataatataatgtacaacttactgtgtgtaagaattccagggagactgcttggtctctgtccttatggaatatgtggtctagttttgcttcaaaagaaagataagtcttctgctaatagaaaaataattgtttgactgtttgtttgtttgtttatgtcaggggagaggagaagaaggtaacagaaggctagtattttatcaaagataccagtaaaattttctgtcaaattaatgattcaggaaaatatacatttttctcatggtattaacctatacttcatattatagactaataaactattcagtttttttagtacaattaaataaagtttgtgtcacttaatgccatggaaaaaccagaccaggggttagagtactctggtatgaaagactatgctttatagaaagttatattagtatcttgaaagaaacagtaccaatgtagatatagatgtttgaacacacgcataatacagacattggcacatatgattatgaagggcaagaggcaccatgagatgctgtctgtaagctgcagaccctgttgtactgtagcatggcttgatccatgtctgaaggcacaaagcctaagaatccactcatacaactccagagaactgatacttccggtgtctaacatcagaacttgtacctattgacaataagtattggaaaagataaatatgaaccaattatggggaggaggagccaattgcccttcctctcttgctgttttatttgggcatcagccaatgatatggattgtatccacccacaattgagggcagactttcctattcaatccatcaacttgtctcacaatctcctctggaaacacaatcacacctcaaaacaatattctttaatctagtcaaattaatatctaaatttaatcctttgaatatcttaagacaccaatatttaaatattaccttgtaaaggtacttctaaatgctttgaaacatctacattatcaaatattattttcaaaattattttttatcttcaatcaaatggacaaccagctaaataggtgaatatctgttatgatcattctgtttttccattttaattatgaatttcaactttaattatctcctttgaggaatgtgtgggtgtatttagcattgccttattttttgtttattcttggtttagcaatacatgagaaaataacatgaaaattatgtagattgatgaaacaaactagtgcctttactgtaaggctaaacttctagaatctagattcagaatctaggttctgaccttgttctatcaagggaaccacacagagtggatgagttgattaaaaactctgatctctttcctccagcacaaaatggggataattatagttacctgcatctcttgggtcctatgagtcttaattacttaatatttgcaaagcacttggagatctttgaattaaaagtgctgagccatagaaccaaagttgagtacagttataattggaatgaaagtttgtagtttctcccaatctctctccatgtcctattcttttgccaagccaaacattactgatgattgatacttaactctgcctactactgtaaccactttccctttcaaagcatgtttcaatagagattgatccagacccataattccacatgtaaacaactacttagtatttatttttaaagctcactattcaataagaatacaattattgaacttatttatttaatgtagtctagtttgtcactccttgaagtcttctgtgtgccatgttaaacacctccctctgtttagaaactcttctaggatcttcagtgcccataaagcagcatctaattcagttgccatcattcctagaaccttaatgaatttgggcagttgtttggtcttgtttttaccacttctagtccagagctcttttttccatcttctaattctaatccttctctcatctcaaatccgttcatcatttaattgtcacctacttctatcttatacagagatctctgaatccaatgaaagcttcacaaagcatttcttcatttcttacctggaaagagcatctctctctttttaaaatttcatccattccttccctggatcatttgtcttttttctaaagtcacacaatggtcttaacctcttcttagacattgaaactagaaactagatcccttgccttataattgaacaaacagaagtgaggttgatatatgaatgtggtgaaatcagatgaaagttaaagatttttcatgttatttttcagattttcattagtgtattagggttttactgctgtgaacagacatgatgatggaggcaactcttataaagacaacatttaattgggactgccttacaggctcagagagttcagttcattatcatcatggcaggatcatagataccagcatccaggcaggcaggcatggtaatggagaagctgagacttctgcatcttcatctgaaggctgccaggagactaacttccaggtagctaggactagggtattaaagcccacacctacagtgacacacctactccatcaggggtacacctactccaacaaggccatacctcctaatagtgccactccctgaaccaagcatatttaaaccaccaaattccactccctggcccccataggattgttcaaatacaagagtttatggggaccatacctagcaatcgcattataaaaaaatacatttagtccaacttctgaagttcccatagcctatagcattctcaacaacattaaaagttcaaagtttctttttgagacccatccagtcacttaactgtaatccccaaagcaagacaggaaaccagctgggcaaactccaaattacgggttgatgtgaaagcagtcttcagatccccaactttttttttttttcatttttgttgactgcctgcgacaaacttttttctcctagtctaattccactctctgttagcatctttcttcagcagatattccaaggctcatctcaaacatcttggggtttccaaggcaactttaatgttacagcttcttgttccaatgtctgggatccacacattatcttctaacctcatccaaaggccttgggccacacctccagctctgcctctgtagcactctaggctctggttgactccactccactgctgctactgttcttagtgatcatcctatagcatggcatcttcaatatgctggggtctttcactgcaactaggcttcaccaatagcctctcataggatctctttatggtaccaagcctcaacttctttgcatgactccttcagtcctgggtcatcaaatgcaactgagggtgatccttcaacaatggccttccatggcctctcacagtgccaagcctcagctgctcaccatgaccccttcataccttcaaaatcagtaccacctgggtgactctgacacattaccaagtacagctgaagcacaagttacaaccttggccgtctctagaacagagatttttttgtgctctcagaaaagacttcccagatttcacctcagtagttctggtctcctcttaatcaccactaatttttttagctccagctaactagcaccagttgtcccagtagtcccttctatacttgacactaaagtcagagccacatggacaaagctgccagagttctgctgcttgctggggctggaagatgccaccccaccccccacccctgaccccttacattttattcccagctttctgttttccagctttcttactgcctaaatttggctgtcctataacttgctttgtaggttgaccttgaactcagggatctgaatgactttgtttcctgaatgctggagttaaaggtgtataccaccacacctggactgaagtttttcttcatctagaacctgctctgtcctaggctggccttgaactcagagatctgcttgcctttgcctcctggtctagacctaaacttagctgggtgcccctaggtcaccactcccttaattcaacttaatatccttgaccacaggattcagctccatttcacttcctggtgcctctttaataccatatttttggtatttttcctttctaatcttattacacttgttcaaaacactcttcatgagacttaatcagagaacaaagtctctgctgggtttgtttgtgtgtgtgtgtgtgtgtttgtttgttttgagatttcctttgtcaatgcaattttaatataaatctctttaccttagtctcagttagaatctttagacaagagcaaaaagcagccacattcttcatcaaaataccacaaaacagtctctgggccacatactaaagttctccactgaaacctcttgggcctggtctgcataattcaaatcactcacaaaaaaagtcttccacactcctactaggatagcccattaagcttgacttaaagcattccactagtgtccaaatccaaagtcccaaaatccacattcttccaaacaaaagcatggtcagaccaattacagcaataccccagtccctggtaccaacttctgtcttagttagggttttactgctgggaacagacaccatgaccaaggcaacttttataaggacatttaattggggctgccttacaagttcagaggttcagtccattatcatcaaagcaagagcatggtagcatccaggcaggcatgttgttggagaagctgagagttttacatcttcatctgaaggctgctaggagaagactggcttccaggcagctaagactagggtcttaaagcccacacctacaatggcacacctactccaacagggctacatctcttaataatgctgctccctgagccaagcacattcaaactaccacaatgtggttttaataggtctataccctgtatgacagaattaaacattaactggtctttctttaacattatcattatccttgctagttataagactgtctaagataagccaacctgtcatgaaactgtgttttcttctgcttacatacacaagacaaagagattaggaataaataaagcttgtataggcctctatccccattatcctgatttgcttgtatgattatttgtttcttctcaattttgtccatgaaaatttagttctaacatgactaacttaaagggagaaaacacttttcttggctcacacttcagagatttcacttcatgatcaactgcctccactgcttctaggcctttacaaggcagaatgtcacatagcccctatttcctatggcttctaccttgccccattgaccatttaattattaatctatcaatagatataccatttatgagatcagagccctcatgatttattcacaatttaaaagacccacctctacacctagcttcagtgagaaccaagtcttcaactcatgaggggaagatctaaatgatgacaatgattaaaaacagttctagtagtatctttatcatgctggctttagaaagctggcctttgtgatatgtgatctataactctgtgatatataactatagaaaatggtgcccaagttttgtaagctccctccttgccatacacgttctcttccctgtgattaatattctaaaactggcattaagttctggtagcaaaaacatgggtgaggagacctgttagttttgtgacatttgacagagttagaagtgtaactgctgtaactgtgtgatcacgatgatagtaacttaacttctctttgtgacaatccaatttgatgacgattatgaatgttctgcaatcttttagtcaacacaagttgttgtggaactacagtagaggagcaagctatcatgcatattgtcccggttggattttaggtcttgtgagtcacacttctaactaaactttctttttacttttttttttaatgtagcatgcattatactgactttactgagatgaggctaagaaagtcttcctagaactctctaggtattgattgttgttaagccttggaaaaattagtatcagtgaattaaatataagtagacatagactgatgatctacttagtagtgccacatgacccctttgtctttggatgatgagatttatctggaattgcattaggttttgtcaccatcagaagtatctaagagaaaaggttgaaaggaaaaaaggtttattagagatctcagcaaatggctgtcatggaggggaagggcatagtagaggaatgattcttaccttgcagaacctggaaagcaaagagaaaggggccaaggacaaaatacccttctcaggtaccttccactgactgatttctataccaaaaccctacttcctaaggtttctaccacttcccaaagtacacaccagctgatgactgagccttaaacataggggtctttgtggagcattttatcttcaaagcacaacagggctgcccaacatatcaggagccatgatttcaaaaagtagagcttggcatgatggtacatgttgtattcccagaacttcagaagctgggacagaaggaatgaggctggagccaaccatcctggaggacatagcaagaaacatacaataaacaggaaaagtgggtcatgcctttgtgctcacataaaagcaccgagttacttttcaaggcatcttctaaagccttgtcaacaaataggccaaaagaattgctgaagtaccactcaaaggggatcagagacgtggagctgtgtatgttgccacctagctaattacattatctctttagatgctcagcctggaaggaaagctatgtgttgacttagagaggaagccgagtcacattgactcagatgtcaactgtgcacttggaatgtgcttacagaattgctgagagaatgatagccggagccttgggtgctttccttatcaggatattacccataaaaacaataaataagagccatgaaaggctgaggaaacctcattaagtatataaaatgtatcattagaagactcattggtgtaacagtaatgagacaaatctctagctctgcagctaagatgcctcagtgcctccaaccatttaaaagcattcagccttttagtaaatgcttacaaaatcgacatctcattgcttctaaaattcaccttctgcttatttcaacatgtcagattgcattgtgtcctcttgtagtatcaccttgtgattcttggtcagccaatcattatatccctaccattgccttcatccatttcttttgtttttctgattgattttttttaatgcacctaaggcgtgtgtgtgtgtttgtgtgtgtgtgtgtttaagatgaaaataaaacatggcatataatgtcaaatcttcaccaatgtgatatagatgactaaaatatttatttatttatttatggatagggtctcactggttagcccagaactaactatgtaggataggctagctttgaattaataaagatccacttgtccctgttttctgagtgctgggattaaaagtatgcaccaatataaaacagtttaaatatgtattatttcattggtctaaatttgaagatccccttgagttctttaaatatagacttgtgatattaggagaaaagtctccctcaatggtataagtaccacctgcccagatcagagacctccatgtagggtccatttctgtaatggtgctggatacaaaacactcctaaacttttagatatcagcagaattaacaggtatattttcctcaaaccaatttgcctttctaaccttaaattaccatgtggtccgagcagttcttctctctctctctctctctctctctctctctctctctctctctctctctctctctctctctctctccaaattactaattattcatattggacttttgctggtcagtagtataaaacacacaagcaagcaaacatgaattaatcttctctgggtaatttacaaactcataccggttcatcatgtccaagctcaaggctgcaaagatactctatagaaaacagcaataacaaaagttcctaggacacaagtgacccttggctaagggtgaggtggctatcaagcaatggagatgctgtgcagaacagcggagacagctttaggcagtgtccagactcctggggaaggaagatatgcgccttcttcagagagatgctgcactagtctcaaaccattgcctgactgtgagtgtgaaatgttgtttcactcatttctccttctgtctggctgtgcttgagtaactagctctgtggacaacttctcttactgtggctgatgtgtggaggctgtgcacatatacgaagtcggaaactgttatgtgcattgctctcctgaggggaagagtctcaagataatggtgatgccactgtagaattggaaagagctttaatgtcccactttggcaagaattcccatagcttgtgttgcgtaagctgtctgtgcactgtgccctatttcactggaggtaggttgttcttgtgttcagcatctcattgtgagcagaaacatgcttccttctggtggacttaccctgcataatgaatgctgagtgtgtatgtctttacaagtctatgttccacagccaataagtagaaagaaagttagcctattagagttaaagagatgctactcgttactactaagaggcagaatgcttccggtaagtaattcagaagtcttccaccacctgatgtaagcttggtttggtccataggtatgtgtcaattttgcttgttattcaattttagttgggtttgcggagtatgcttatagatgcaagccaaatttaactttgaggtatgttattaagtgactctgtaggaaagttcaaatgcacagaaagaagtactagatgccaattcaaaagcgtgtaaagtactactcagctttgtaaaggtatgacaactcagtgtcacacacacacacacacacacacacacacacacacacacacacacacacacacttgagaagggggtggagttctgctaatgagaagctgagctctctgtggtttgccaaaacaagccatcaaagtgccctctgagtctggagagatgtctgctcgtgaaaggcattgatcctgacttgaatgcctttccttgaggactgttccagctttccagctttctcttaaaagatacattgttttcatccctgcctcaggcatgtcattagaacaaacctattgaaaatgaattgtttggaaataagcaaaaccttcacagatgtagtaaaacgttggagatgggatctctagttccttaagtttcttcatgagaccgggcaagtcctgtgtggccttttggttccttatccgcaaaacatggtggtctacatcgcctctaggaggaaaaggcccctcccagcattccgaccgaccgctgttttatcatactgctcctgctcagactgcttagagcaccagacacccagccctctagccactaccgtttccatcacacattcctcccaaggactatgctgctgacttgaaaggaagattactattccacttgcagttgttgcttagtaacatttgtgattgtgtttctggtgacagcgtgtgcagagatcattaaaaattaaacccccaaagctgctaaagcgggaggaagtgggagcagggaagccacagtgtgttcacttgcttagaaaccgtttactctcaggcttacatgtaaatcttggggaaaacattgcatgtctctggtttatattaagccacatacagcacagtaactgacattgatttgtgtcccctgcagctggagtggatcagtaagacaaaaaaaaaaaaaaaaaaaaaaaaaaaaggtctgaaattacaagcagatgggccacatgctgtccccgagaaagaaagttctaacctgttctgtgtctgtctctgcttccttcccacagttccaccaggtgagaagagtgatgaccatccttttccttactatggttatttcatacttcggttgcatgaaggcggcgcccatgaaagaagtaaacgtccacggacaaggcaacttggcctacccaggtgtgcggacccatgggactctggagagcgtgaatgggcccagggcaggttcgagaggtctgacgacgacatcactggctgacacttttgagcacgtcatcgaagagctgctggatgaggaccagaaggttcggcccaacgaagaaaaccataaggacgcggacttgtacacttcccgggtgatgctcagcagtcaagtgcctttggagcctcctctactctttctgctggaggaatacaaaaattacctggatgccgcaaacatgtctatgagggttcggcgccactccgaccctgcccgccgtggggagctgagcgtgtgtgacagtattagcgagtgggtcacagcggcagataaaaagactgcagtggacatgtctggcgggacggtcacagtcctagagaaagtcccggtatccaaaggccaactgaagcagtatttctacgagaccaagtgtaatcccatgggttacaccaaggaaggctgcaggggcatagacaaaaggcactggaactcgcaatgccgaactacccaatcgtatgttcgggcccttactatggatagcaaaaagagaattggctggcgattcataaggatagacacttcctgtgtatgtacactgaccattaaaaggggaagatagtggatttatgttgtatagattatattgagacaaaattatctatttgtatatatacataacagggtaaattattcagttaagaaaaaataattttatgaactgcatgtataaatgaagtttatacagtacagtggttctacaatctatttattggacatatccatgacctgaaaggaaacagtcatttgcgcacaactttaaaagtctgcattacattcctcgataatgttgtggtttgttgccgttgccaagaattgaaaacaaaaagtttaaaaaaaataataataaattgcatgctgctttaattgtgaattgataataaactgtccctctttcagaaaacagattaaaaaaacaaaaaacaaaaaaaaaaaaacaaaaaacaaaaacaaaaattggaaccaaaacattccgtttacattttagacactaagtatcttcgttcttgttagtactctgttttactgctttcgacttctgatagcgttggaattaaaacaatgtcaaggtgctgttgtcattgctttactggcgtaagggacggggaatgggaggggtagatttctgtttgttttgtgttttattttgtttgtttgtttgttttgttttttagttccacccggagtagggatggagaaaatttcttcactatccattctggttgataaagcgttacatttgtatgttgtaaagatgtttgcaaaatccaatcagatgactggaaaacaaataaaaattaaggcaactgaataaaatgctcacactccactgcccatgatgtatctccctggtccccctcagctcactcttctggcatgggtcagggaaaattgcttttattggaaagaccagcatttgttcaaagcatactctttccctccctcctcccattttggtcccttctttttgttttgttttaagaaagaaaattaagttgcgcgctttaaaatattttactactgctacaaacagatgaacaatgtgtgtcattttatgacactcatggaaaacagtgatttttttttaccctaaagaaaaacaaataaaaataacccaaaatattctttttttaaaaggcataaatattgggtaaattgtaatatggcctaacagtgtttgcagataaaagttattgtatacacccagatacttagataagagcagggatccacactgccattgaaataggactgaatggccctgcggaggctaagtggagctgacatactatttcctggcagtgcaggaggaatttctgagtggccatcctaaggtctaggatggaggtggggaatggtacttgagacattcctaaaggaaggctcggaagcacccttcagagcaggctctggaatgatgtgtcaagttgcttaggccttctgctttaagtgcctacattacctaacagtgctcaagaggttctcgattggagaaccacactcaaatccatttatagcctccatcccatttctaaataattgtgtataaagttggattaacctggagcaactttggatccaaatatggcacagcaataatgatattaatgcagcatgatgggaaatgtttgctgtgaagagaattgatttgctttgagcttagacttcaggaagcctaggttttttatttttttatttttgagacattttggtaaaaggaaaaaaagaaaacaaacaaacaaacaaacaaaaccagaaaaagcatcaaaactcaggcagaatgagcaatgtctgaaagggctagaaaaacaagacatagcaaggtgctttcactgtgaaagagacaagaacacaggaggaaatattgcttcagtgaagagcacagacggctcctgccaatttattacaagagtcccgtctgtactttaccctttggggttagaagtcaagttggaagcctgaatgaatggacccaatgagaactagtgttaagcccatttccctagtcaggtttttttcaagcgtgaatgtgttagtggttactctcctgggttcctgagcatcagaaaaaaaaaaaaaaagaggcaaacaatcgcttcatcttaggagtggaaaggaaacagaagtggacgtccgctgtgactcagggagtgaagataccatcagcaaatagtttcttttttgttcattcgttcctttcgagttagcctgtcttttggaataccactgaatatgctgtttttgaaagacttcatgtagcatagattgttttgtgccgtttaccaaattaacctttgtcatcgttttttaacctattcaggaatgcttggaatatctgctctatgttaactttttgcagcttcattctgagagacattagtcaaacaaacaaaaggatccccatcacaatcttacagtactgcaagggccaggtctgttaatcggcttcacaggagacatcagcaattgtgtggtcagtggctggctctcttacccactaagatacatcatagctacatgttggtggtttatgttgacctgagatttatttgttaaaatctcttcttcgtttctgttcgttctggttctgttctgttctgttctgttctgttttggttttaaagtcttgctgtggtctcttgttggcagaaatgttttatgcatggcagcaggcctgttgcttttttatagtgattcccattgaaactgtaagtaaatgtctgtggccttgttctctctatggtaaagatattattcaccatgtaaaacaagaaaaaatatttattgtattttagtatatttatataattatgttattgaaaaaattggcattaaaacttaaccacatcagaagcctattgtaaatacaggttctatttaagtgtaccaattaacatataatatatgttttaaatatagaatttttaatgtttttaaatatattttcaaagtacataaagtctgggggttctgggttttttctcttcactgtaaaatatgaaaatgtgtttcattataaatacatgtgttccttgctttaagaccatcttgactagtggtagcaattgaacagtcctccacacaggaagcttatttcaaagcctggggaggccaatcctgcagtctgtaagcttcagagaagctccaggattgggcctgtcttctgtggtagaagacaggagtgtcgttttctaggacacttgaaagttttcccctttgaagtgatatactttcgtcaaataccaaatcatgcatcctagcaacatcaggatccatgaaccagggctgacaggctctatttgattataaaatagctttttttttttttttttaaaaatcaaagtaggtttacttagggataatgagaataaattggttcaaatttagaaagtcactgactgaaaaccctgcagaaattcaatatttggagacaggtcgtgtccccttggtttggaagtggtgccatttgcagcatgtgcttgtatccattgcactgatttaatttttgtatgtggagcatgcagattttatatcatagtatccatgatctaacagattgctacaatctctaaaaagatttgcctccgtgacggctgccaagccgctgggtaatttagttaaagtgtttaaagttatcactaaatcttagggaaataaatggaaggattttaaattatagaaagggccattaaggaagaaagcatctgttctgactcctaaggctccctgtttgagcactgacagcccatcctagaaagtggtgaactatatctgtgcaatgtatcatttctatttcaaacatacacacatggtttcctcggatattgtcttataaataaggatcaggaaagtcataacaaacactgacttgtgttgtgtatatgcaaaagcaaatcaaatgacatgaatgactctaatctgctcgatgcatttgcagagttctctgacctctgagagcagcccctcactcccagacacacagccatgacagcccagtcatgaaattagaactttgcaatacttcaggcttattcaatttttatagttaacaaagactaaaatattttggggaggactgagtaacaagaggtgggaattaaatacgacatccacatttgtgacattaaatttgtgacataaaaccgcatacatacatacatacatacatacatacatacatacatacatggatatttagcctggaaagactatcatggatatggttaactttaacatgctgactagcatgggaaataggatgaagtttccattagtaacaaacgtcagatcaaaagctatagcttacttagccaacataaaatgtcgccttagctgtagagagggggaaagagagggagagagacagagagagaatcaggtcagaggaacaacaaaatggaagtattgctaaattactcaagttggagtttaacaagagtaatcagtttccactggattaaacctgcttaatcattgaggagcttgggaataagagagagagacagagagagagagagagagagagagagagagagagagagagagagagagagagagagggagggagagagagagaaagagagacagagagagagatgtcagagaacaacaacaaaagtggaagtattgctaaattactcaagttggagtttaacgagagtaaccagtttccactggattaaacctgcttaatcactgaggagcttgggaatgagttgcatggtttgctctgttgctttcatcacattaatgagcctctgtggtcattcgatgtgtctatgaagttgttttatcatctgcattgattttatcaataatatcccagctgctaatgaaaatttgaagtaggtcttggaatgaaagggtgaagttttctcgtattcattgaagggattagcacactctagaaaagagagcagacacctttgaactgcaacaagagacttcaggccttacctcgggtcggctagcattcctggcaacgttattactagtttctcctattctagtagcaagagtgttctataagtcagccaaaatgaaatggccatattttcgtaagctattgctaacacagttaactgagatttaaaagaaaaccgcatacatacatacatacatacatacatacatacatacatacatggatatttagtctggaaagactatcatggatatggttaactttaacatgctgactagaaatattagtatttgatgggacatgggccattctttgagctgtgttagctcttgccttaaaggtcagtcctttagtttggaaggttgaagagtaactgtgaccggctctcttttagttacattgacctttctttggttgagcttccatgtgagagccaaaggttccatgtgagagcctgaaaggttagtgtaaagcacccagagcctacacagtccagctagtgaacactctaattgcatctctagcaccagtcttagcatcatctattcttttaattttagcaagtattctttctaggaaaaaaaatgcaagtgccttgctttttaacacatgattcatgataatatattatttaaagaataaatatcacattaatgacaaaaatactgcagcattttacacattctatcattcattaacaaaaatctatttatgtggcatgacatagactctccacaagcctttccctcagttccttttataacttggtaagccacaacctcagaagctcctaacctggcatttgcatggcgtctgcatgcttggtaatgacagtagcatcaaactgtaaaagctagtcttacaattaacaaatcaaaccaaacacgcacacaaagccacctttacatttattttatgtacgagctgctatttgcttttaatcatgaaatatgaagaaagtagtttccttcaggaaaaaaaaaagatgttttctttatcctgaaaacaatctcataccaactgttagagttaatgacaggatgtgtctgaagcatgtaaatagccaaggagtgagttggaacagcttgaggtgtcctcagtgcacaaggctgtggggatctgcttctgctgggctctacttcactgctgtgtatcctttcaaaccattccttagaaacaagaagctgctccggtcataatgtatggactaaggggagatagttttgttttgcttacatgctcacaatttgtaaaaagtctttatcaagtaccatactatacattcaatttatttagtaaagttgtatcacttcaaccaaggcccaacatttaagaaacagtctctgaactgaaattcagtgcacattttttaaaacagcagaacccttccctaaaacctactaaatgtgttcacttggtgatcagtgtccctattcttctcccactgcactagtacagtgagtcccagactgatcttcggacaccagcagcagcagcagcagctctagaaactccttagagttgtacactcttaggccccattctagactcaaagaccaggaggctctggggctgccccaatagtatggttcacaagtactcggattgtgttgtgagtatcactaaaaagggagtccaaccctaccagtcttctatgtgtttatctggataacagagtgttagcacagctcatgggtttggaactgtggtctctggtccttctaggaactatctctttccaagactccagctcccctaccttcaagtagtctagatttccacttcctgaagagcaatgagtacttaaaagtggtataaggctcagggttgcactgacagcttaaaagcctacatggaaatgtaagccaaaaaaagctcactccagtttatagtagacattttgttctctttcctttcaaagtcacaggagtaatggagtcagaatacagagcatgcagtcctttgtaacacatttgggatgactctaggaactgagagccaacatgcagcagactagtaaagaaaagcttagtttatctaagaaggtaggctgtgcccttgacaacagccctgtctctacgaaatactgttcataagttaaatatgcatgctggcctaattagccattaacaggatgaggggtcctaggctgacactctagaatgaccaagtgtcttccctagtctttgtgacttaccttttccttgtagggattggcttgtggaaataaggccctacaccaaggcccatgttctctctctctctctctctctctctctctctctctctctctctctctctctctctctctctcctctctctctgcatattctagacatcaagctgcatttgaagatgaaggaaggctggccaaaattatttcccaattggcaatatggaagattgaattatggcaaacttagcttcaaagccaagaaatctggttaattcagccataactaggcttgccaagacaatctgagtctctgatcctctgctaaggccttctctcactcttagggaaggtcaagctggagtgtcttggggtaagattttagtcctaaggcactctatgtactctattacccacactgacaagagattacaaaagagatttctgacatgctttcatgatggagaatgcctagaaatgttctacatcctgcctccctcctttcttgagcctcttttatttggcaaatgctacaaggctgtgacacctccagtcagtacaaaggtcgtggtggctaggcccccaagagacttttcgctttaaatgcagcttatatagtttttatttttaaccgaatatgtaaaaaataaaaaaatttaaaaaagtatgccttggcaaagctgaccagcgtcaaggggtgaactttttctgcctggttctaaacttaatttgaagctagcaagacaatgctgctaacctgttgtgctttatttctttcctacttgcatgctctattacgtggtgcctggcagaaagaactccagcaagtaactaagttgtggtgacaggtgccacgttaaagtgctggatttacatcccattgtcccggtttcagaagtctttgtaacaaaacggactctcaattcacttctggtggtcattacacctttgccaaggatgtgcgcgtcccagcatgcctctctgccacgtccgaacactaagtccatctctgctgtcttgagagctaggtgtctcacaattagatgtggggatggcattctgaacgacactttggtcagcataggggaccaagctcattggcatgccatggcctggaaccctcattccaacctccaagctttggattattcctggcctagagttcttcaggcctgaatctgtcagagatctgtttaccatataagtctatcttctcctaatgctattttatacctggcttcccttttgatgctctccaggatctgtgtcctctgggtcccatcttctcacctatcagaaggcagacactacggccattaaggttacagagtttgaagcctggcccgtgcgtctgaatttcagccctgctattacagctctgtgactaaagaaaagtcactcaccttatcatgtctgtttcctcccttataaataaaacaggttaaaacatgcataccttaggatattgtgcaaattaaacaaggcaatacacataaagctttgaggggaaaaaaacaaggagctcacagaaaagcctcagaaaacatcacagatccttagaggacattctggtaagtggctgttgcctggcatagaccttagagatccctctgctgttctgtggttcctgggaaggatcccatgttgtctgtgcagcactccagactactttggtttttttctagaaagtaaattcctgtttatccacttttgtgtcagttaagaagtagccactccacatacataggcaaatggaacagaaaactacaataaacggtgattctctggaattcatatttcaaatgttatccattgtccctaagtgtctgtgccagacaaatagcaagggctgaggcagcagtagatggatgaattcatgtctcaaagagaaatggaatcactgtcacatctctgaaggtggtcaaagaagagcctgcctcagtctcctgtcgcatcttaaacatccattccatccctgatcacagaaaactctcgaataccataaacattcctaacacctgcatagagtaactcacatcacaaaatttatgatggattggtcgcaccaatacaaagaaactaagacacaaaggaaatttctgccaaagttctcagtgtttatgagtaatggagcagggctagatttcatgtagcctgcatctgcagccactatcctaactcctgtcaaaattaaaagaacatgaacgaaactgggaaagtacaggggagagggggaggagaggaggaaagcaaagagggaggaagacggagaagaggaagggggaggaaaaaaggagagggggggggacgggaaacggagagacttgagcttccgtcagaaaggaagaccactaatgatgcttattcttttcaacttcaaaagagcactgactggctcttttaagggttaacaggcaaataggctcatattgcatgaaggcccctcccaaagtgtatgcaatgctgctggctctacgctgagcaacactagggcagggttccctctactttaagccagctgttttcaatacctagaaatgagacagctgtcatcccttcaactttgtaacagatctgaaaggcttcctgtgagttgctgggattgggtaggtgagcgttttagaactacttcctaaactcaggaatgctcagtcctccagaagtcagtgttctttgagtggtacttaggactggcatcatgtgtaataggcaagtacactaccacttagcaacacatccagcctgcccaggtcaatactttacagaattatttagtacttatggttggtagagaagaaaaaggacaatggttcgaaccctgataggtctgcaacagtcttggacaccaccacctactatctctctcctcagtcttccatatatatatcatacctctctgcaaagttctaactgaattcatatttcacatggttatgttctgggtgatcacttccaattgacaagaactgacccaaaagatgaacttgacttgctttcctgatttcccagtttttcgagaacaggtctgtcaggtggtggaggttctgacaccaaactcaaggttcagcagacacaaagcctgaaagggtgatacatcttctatagacactaacctcggagtgacatccatggacttcaaacagatgatccagtgagaagccggtaaaggatgggtgtcctaagtgttagttaaacaccaacgaggaaaagaatttgagaacagactctaatagtacatccttaagttgtatgagacaccagagtctctgctttccatgctctgtaaaatataaaccagatggccatgtaattatagacatggaaactgacaacacaggagcctacataggttttctgagttatcacagttaataaataatatagtcagatttgagctaatatccctattgtacaaaggcttcaatcttaacttatggctctcaatattgacatgtacatttgagtcacacaaagaagctttaaaagttcttatgccgacctcaaacacgggcaagttaaattagaatcctgacagtggaacccaggcaactgtattttccaaaagtcttcccagtggtgggttcagggtaaagtattaaccagggttctgcttcctctgagtcagctaatgactaagatcatggaattctaatggttgatcattagccaagcaggaccccaggtctagagtcagctaagcataagtgcgtgcataaccacagcgacaagagacaggcactctagacgctaggagcaacctctggagtcatgacgggacactggagagtccaggttaaccctgtagtattgggccaaggtctatcaactcctgcaggagccctgaacaggaacaatataggcacaaaggctgcaaggagtctgagtctgcaggtgagggtccttggcctagcagtgtagagaatgaagctacaggagttcctcacagccaggtcatcagctgctctcagccagtaacacaccccagtgtcgtttcactactgcctggcttactctgttggcctccaaaaggctttaaatggttcaactggaagaacaaaaacaatctatcatgactatttggaggattttccctattttcaaaagtgaccattaaaatactctttgcctttgtcttctgctccttcagatatttttgtctgtccccctcccctaccgtaaactgccaaataggcagtagtgattgacacttagaagaaagaataaaatctctgaatcctataaccccttcctggagggctccttttagcagcaacgcaggacatgcctggcttagccaggctaatcgaatttggcagatgtactgtgtcagcaggcaccagggtgctaatgccccaggtcagctgcttgagagggtaagtgggcaaatgcctggcttcttccccatgttttcagaataggaatccgagtcccagtaatcatctcgactgtgggaccagaggctattttgggccatctcttatccaatggaaagttaggggcggtgtcatttgaaactgccaaggagcatctgatttcacccttatccgggacatgtccccagaggaaatgggagcaatgtcaaggagatcaaaatgcaggtgtcagaatttccctttgtttgtatttctgggctctttttcatctcttccttccattttcagcttttctttccattgctttggctaaggtgttcactacagctcacctggaatatagcagcctcccagtggtctctacaaacacacacacacacacacacacacacacacacacacacacacacacaccctgcccctgtgttgtctatggcttacctcttgccttttaggatattatctttctgaaggttcaatggaaatgagtgtgaaactgctttgtatcaatcacactgtgcaagtcaccatacccacttatacacaaatgtactcatgtggaaaaagacacaaggatgcagtcttcccttgagggaataaagtccagtgcttttgcaagggataaaatggagcgggaggaatgttttaaatcaacagtgttttaaggcagtgtgtgtgtgtatgtgtgtgtgtgtgtgtctctctctctctctgtgtgtgtgtgtgtgtgtgtgtgtgtgtgtagcttcaaatgagtaccccccaagcattcatggtggcctggtctgcttggtgattgcatgtcagaaacaaatgtagactgtagctctaattatggccatttctcatggaactaatgctgagagaggctgtgaggcagaggcaattactggtataaccaggagataaattcagaggacatatgctctctaatatatcttagtgatagatggacagattatataatctttctccatttaacacgtggagtggctcatcattactgacagagtgcacatcagtcacagtggcattcatgacttttatgatatggcttcaggttattctccccatcatatactcaaacaactcattacataccttacactgccctccctttccacatcttccctctcgctatgtggaatctctatgtaatctatgcctttatttcttttatgcttccttcctggatcatgaaaagtcctagccagctgtaacctaactgtggaagctccctccaagacggatgaccctccttcctcaaaagctatcaactgccagttagatagcttcctcagttagatataggatctgcagagtgcctccccatctacgcagtaattttggctggctttatcttatgcaggtgaccatagctgttgtgagtggaggactacaatagctggggtgtatctagaagacagtagtcctccacaggttctgcactttcaattcttctatctgccaatcctgcctgtaatgtagtaaccccatgtgcatcttctcgtagaaaatcttggtgattgactattttccattctcaccaaatctattcaaaagcaattcacaacaattcgaagttaaccaaatgctacaattacttttcaaaatgctcaggatttcattttcagaagttttagactagcctgataagccattggttttggtcagaaaaaaaaaaaaaaaaaaaaaaacatcactacatgttcttttgactcttttctgccatagctctcagctttgtgctctgcctccattttacaatagaagatgcttccaccttccaaaatcagactcagcccaaggcatcttatgcgccattgtgaacttatcaaagcagcttttcaattaatcacatctttcttcacaaaggaatcttcttcttccaccctcatttttctttaaatgtcacatgctacagaaccttgaagactcccatgaggcttttgggattcctcccttgaaatagtaactacttaatagacagtaattatctttatgctggccagcactcttgttttaccactcttcttctcttaggtactagatatttccattcatctgtttgtctgccacactccagccatccacctgtcagaaagccctcaacatgtatgttttaaattgaatgttcataggataattgaatgaacactacattgtgagtatatctgcccctaaatagccataaaatagcagtacatctcagcaataaaaagaatgtatttaaaagcctaaatgaataattcttttctctggttatatgttggtcatctgggtgtttaaaagaacacaaaaacatgatgtctagacagtattccaagtcaaatgaagcagagccccttcatcaatttcatcaatattgttttgaaagctcctaagtaattttgccagacagcaagattgaaaagcatataattttttttgaaattcaattactattattctgagtctaatccatgacaggtgaaaaacaacaggtaatagggagaagccctgtggatgccttttggtgtttttctaataatttgcatcatgctttcacacaaatgtatatacattgacacataaacgtcacacagtgtggccactgaggttttagatgtttcctctttataactgggaagaacaagatagttccaaaatgcagtgcaaataggtggtggcgttggatttagtgagatcaggttttgcttcaacaggatttcaactctacattcactatgtgggggctctggtttcaccagaataatgataggactttgtgggaataaaacaattaagaacttgctgacggtgaattgctccatctcacacatccccatccctactacacaccaacctgaacagaagaaaactaagcagttggtttcttcttggtttggatacattccacttgatgttcttccaggcattgtgaagtagaattcctttcagtatatgtgactgtaaagagatggattcttgaaatggagactttgggaaatgaggataaacatgagcagggagaaagcatggtcctaggagtcagtcgactggaattcttgaccttgctctgaccctctccaaccatgtaaactgggcaagtcccatcatttcttccagtcttggtctctgcagtacatttatgctgccataacagaagactcaagaccaaggtttataaactacagaaatttatttcaaacagtgctagagacagggaggtgtaaggttaaggcaccagtgggttcagctctctggtgagggctgttctccagatctaagacaatgcattgatgctgcatctcccagaaaagggggacattgtatcttcacatgacaaagaaacagagagggtcaaacttgccctgacacactcctttatggcagcattcattaattcagagctccctttatcccaacactcccgaagtcctaccttccaaggctgttggagtggagctcaaatcttaacacactgattttggggagacaca

SEQ ID NO: 958 - DNA, 76344 bp, Mus musculus
tgtgtctccccaaaatcagtgtgttaagatttgagctccactccaacagccttggaaggtaggacttcgggagtgttgggataaagggagctctgaattaatgaatgctgccataaaggagtgtgtcagggcaagtttgaccctctctgtttctttgtcatgtgaagatacaatgtcccccttttctgggagatgcagcatcaatgcattgtcttagatctggagaacagccctcaccagagagctgaacccactggtgccttaaccttacacctccctgtctctagcactgtttgaaataaatttctgtagtttataaaccttggtcttgagtcttctgttatggcagcataaatgtactgcagagaccaagactggaagaaatgatgggacttgcccagtttacatggttggagagggtcagagcaaggtcaagaattccagtcgactgactcctaggaccatgctttctccctgctcatgtttatcctcatttcccaaagtctccatttcaagaatccatctctttacagtcacatatactgaaaggaattctacttcacaatgcctggaagaacatcaagtggaatgtatccaaaccaagaagaaaccaactgcttagttttcttctgttcaggttggtgtgtagtagggatggggatgtgtgagatggagcaattcaccgtcagcaagttcttaattgttttattcccacaaagtcctatcattattctggtgaaaccagagcccccacatagtgaatgtagagttgaaatcctgttgaagcaaaacctgatctcactaaatccaacgccaccacctatttgcactgcattttggaactatcttgttcttcccagttataaagaggaaacatctaaaacctcagtggccacactgtgtgacgtttatgtgtcaatgtatatacatttgtgtgaaagcatgatgcaaattattagaaaaacaccaaaaggcatccacagggcttctccctattacctgttgtttttcacctgtcatggattagactcagaataatagtaattgaatttcaaaaaaaattatatgcttttcaatcttgctgtctggcaaaattacttaggagctttcaaaacaatattgatgaaattgatgaaggggctctgcttcatttgacttggaatactgtctagacatcatgtttttgtgttcttttaaacacccagatgaccaacatataaccagagaaaagaattattcatttaggcttttaaatacattctttttattgctgagatgtactgctattttatggctatttaggggcagatatactcacaatgtagtgttcattcaattatcctatgaacattcaatttaaaacatacatgttgagggctttctgacaggtggatggctggagtgtggcagacaaacagatgaatggaaatatctagtacctaagagaagaagagtggtaaaacaagagtgctggccagcataaagataattactgtctattaagtagttactatttcaagggaggaatcccaaaagcctcatgggagtcttcaaggttctgtagcatgtgacatttaaagaaaaatgagggtggaagaagaagattcctttgtgaagaaagatgtgattaattgaaaagctgctttgataagttcacaatggcgcataagatgccttgggctgagtctgattttggaaggtggaagcatcttctattgtaaaatggaggcagagcacaaagctgagagctatggcagaaaagagtcaaaagaacatgtagtgatgtttttttttttttttttttttttctgaccaaaaccaatggcttatcaggctagtctaaaacttctgaaaatgaaatcctgagcattttgaaaagtaattgtagcatttggttaacttcgaattgttgtgaattgcttttgaatagatttggtgagaatggaaaatagtcaatcaccaagattttctacgagaagatgcacatggggttactacattacaggcaggattggcagatagaagaattgaaagtgcagaacctgtggaggactactgtcttctagatacaccccagctattgtagtcctccactcacaacagctatggtcacctgcataagataaagccagccaaaattactgcgtagatggggaggcactctgcagatcctatatctaactgaggaagctatctaactggcagttgatagcttttgaggaaggagggtcatccgtcttggagggagcttccacagttaggttacagctggctaggacttttcatgatccaggaaggaagcataaaagaaataaaggcatagattacatagagattccacatagcgagagggaagatgtggaaagggagggcagtgtaaggtatgtaatgagttgtttgagtatatgatggggagaataacctgaagccatatcataaaagtcatgaatgccactgtgactgatgtgcactctgtcagtaatgatgagccactccacgtgttaaatggagaaagattatataatctgtccatctatcactaagatatattagagagcatatgtcctctgaatttatctcctggttataccagtaattgcctctgcctcacagcctctctcagcattagttccatgagaaatggccataattagagctacagtctacatttgtttctgacatgcaatcaccaagcagaccaggccaccatgaatgcttggggggtactcatttgaagctacacacacacacacacacacacacacacacagagagagagagagacacacacacacacacatacacacacacactgccttaaaacactgttgatttaaaacattcctcccgctccattttatcccttgcaaaagcactggactttattccctcaagggaagactgcatccttgtgtctttttccacatgagtacatttgtgtataagtgggtatggtgacttgcacagtgtgattgatacaaagcagtttcacactcatttccattgaaccttcagaaagataatatcctaaaaggcaagaggtaagccatagacaacacaggggcagggtgtgtgtgtgtgtgtgtgtgtgtgtgtgtgtgtgtgtgtgtgtgtgtttgtagagaccactgggaggctgctatattccaggtgagctgtagtgaacaccttagccaaagcaatggaaagaaaagctgaaaatggaaggaagagatgaaaaagagcccagaaatacaaacaaagggaaattctgacacctgcattttgatctccttgacattgctcccatttcctctggggacatgtcccggataagggtgaaatcagatgctccttggcagtttcaaatgacaccgcccctaactttccattggataagagatggcccaaaatagcctctggtcccacagtcgagatgattactgggactcggattcctattctgaaaacatggggaagaagccaggcatttgcccacttaccctctcaagcagctgacctggggcattagcaccctggtgcctgctgacacagtacatctgccaaattcgattagcctggctaagccaggcatgtcctgcgttgctgctaaaaggagccctccaggaaggggttataggattcagagattttattctttcttctaagtgtcaatcactactgcctatttggcagtttacggtaggggagggggacagacaaaaatatctgaaggagcagaagacaaaggcaaagagtattttaatggtcacttttgaaaatagggaaaatcctccaaatagtcatgatagattgtttttgttcttccagttgaaccatttaaagccttttggaggccaacagagtaagccaggcagtagtgaaacgacactggggtgtgttactggctgagagcagctgatgacctggctgtgaggaactcctgtagcttcattctctacactgctaggccaaggaccctcacctgcagactcagactccttgcagcctttgtgcctatattgttcctgttcagggctcctgcaggagttgatagaccttggcccaatactacagggttaacctggactctccagtgtcccgtcatgactccagaggttgctcctagcgtctagagtgcctgtctcttgtcgctgtggttatgcacgcacttatgcttagctgactctagacctggggtcctgcttggctaatgatcaaccattagaattccatgatcttagtcattagctgactcagaggaagcagaaccctggttaatactttaccctgaacccaccactgggaagacttttggaaaatacagttgcctgggttccactgtcaggattctaatttaacttgcccgtgtttgaggtcggcataagaacttttaaagcttctttgtgtgactcaaatgtacatgtcaatattgagagccataagttaagattgaagcctttgtacaatagggatattagctcaaatctgactatattatttattaactgtgataactcagaaaacctatgtaggctcctgtgttgtcagtttccatgtctataattacatggccatctggtttatattttacagagcatggaaagcagagactctggtgtctcatacaacttaaggatgtactattagagtctgttctcaaattcttttcctcgttggtgtttaactaacacttaggacacccatcctttaccggcttctcactggatcatctgtttgaagtccatggatgtcactccgaggttagtgtctatagaagatgtatcaccctttcaggctttgtgtctgctgaaccttgagtttggtgtcagaacctccaccacctgacagacctgttctcgaaaaactgggaaatcaggaaagcaagtcaagttcatcttttgggtcagttcttgtcaattggaagtgatcacccagaacataaccatgtgaaatatgaattcagttagaactttgcagagaggtatgatatatatatggaagactgaggagagagatagtaggtggtggtgtccaagactgttgcagacctatcagggttcgaaccattgtcctttttcttctctaccaaccataagtactaaataattctgtaaagtattgacctgggcaggctggatgtgttgctaagtggtagtgtacttgcctattacacatgatgccagtcctaagtaccactcaaagaacactgacttctggaggactgagcattcctgagtttaggaagtagttctaaaacgctcacctacccaatcccagcaactcacaggaagcctttcagatctgttacaaagttgaagggatgacagctgtctcatttctaggtattgaaaacagctggcttaaagtagagggaaccctgccctagtgttgctcagcgtagagccagcagcattgcatacactttgggaggggccttcatgcaatatgagcctatttgcctgttaacccttaaaagagccagtcagtgctcttttgaagttgaaaagaataagcatcattagtggtcttcctttctgacggaagctcaagtctctccgtttcccgtccccccccctctccttttttcctcccccttcctcttctccgtcttcctccctctttgctttcctcctctcctccccctctcccctgtactttcccagtttcgttcatgttcttttaattttgacaggagttaggatagtggctgcagatgcaggctacatgaaatctagccctgctccattactcataaacactgagaactttggcagaaatttcctttgtgtcttagtttctttgtattggtgcgaccaatccatcataaattttgtgatgtgagttactctatgcaggtgttaggaatgtttatggtattcgagagttttctgtgatcagggatggaatggatgtttaagatgcgacaggagactgaggcaggctcttctttgaccaccttcagagatgtgacagtgattccatttctctttgagacatgaattcatccatctactgctgcctcagcccttgctatttgtctggcacagacacttagggacaatggataacatttgaaatatgaattccagagaatcaccgtttattgtagttttctgttccatttgcctatgtatgtggagtggctacttcttaactgacacaaaagtggataaacaggaatttactttctagaaaaaaaccaaagtagtctggagtgctgcacagacaacatgggatccttcccaggaaccacagaacagcagagggatctctaaggtctatgccaggcaacagccacttaccagaatgtcctctaaggatctgtgatgttttctgaggcttttctgtgagctccttgtttttttcccctcaaagctttatgtgtattgccttgtttaatttgcacaatatcctaaggtatgcatgttttaacctgttttatttataagggaggaaacagacatgataaggtgagtgacttttctttagtcacagagctgtaatagcagggctgaaattcagacgcacgggccaggcttcaaactctgtaaccttaatggccgtagtgtctgccttctgataggtgagaagatgggacccagaggacacagatcctggagagcatcaaaagggaagccaggtataaaatagcattaggagaagatagacttatatggtaaacagatctctgacagattcaggcctgaagaactctaggccaggaataatccaaagcttggaggttggaatgagggttccaggccatggcatgccaatgagcttggtcccctatgctgaccaaagtgtcgttcagaatgccatccccacatctaattgtgagacacctagctctcaagacagcagagatggacttagtgttcggacgtggcagagaggcatgctgggacgcgcacatccttggcaaaggtgtaatgaccaccagaagtgaattgagagtccgttttgttacaaagacttctgaaaccgggacaatgggatgtaaatccagcactttaacgtggcacctgtcaccacaacttagttacttgctggagttctttctgccaggcaccacgtaatagagcatgcaagtaggaaagaaataaagcacaacaggttagcagcattgtcttgctagcttcaaattaagtttagaaccaggcagaaaaagttcaccccttgacgctggtcagctttgccaaggcatacttttttaaatttttttattttttacatattcggttaaaaataaaaactatataagctgcatttaaagcgaaaagtctcttgggggcctagccaccacgacctttgtactgactggaggtgtcacagccttgtagcatttgccaaataaaagaggctcaagaaaggagggaggcaggatgtagaacatttctaggcattctccatcatgaaagcatgtcagaaatctcttttgtaatctcttgtcagtgtgggtaatagagtacatagagtgccttaggactaaaatcttaccccaagacactccagcttgaccttccctaagagtgagagaaggccttagcagaggatcagagactcagattgtcttggcaagcctagttatggctgaattaaccagatttcttggctttgaagctaagtttgccataattcaatcttccatattgccaattgggaaataattttggccagccttccttcatcttcaaatgcagcttgatgtctagaatatgcagagagagaggagagagagagagagagagagagagagagagagagagagagagagagagagagagagagagaacatgggccttggtgtagggccttatttccacaagccaatccctacaaggaaaaggtaagtcacaaagactagggaagacacttggtcattctagagtgtcagcctaggacccctcatcctgttaatggctaattaggccagcatgcatatttaacttatgaacagtatttcgtagagacagggctgttgtcaagggcacagcctaccttcttagataaactaagcttttctttactagtctgctgcatgttggctctcagttcctagagtcatcccaaatgtgttacaaaggactgcatgctctgtattctgactccattactcctgtgactttgaaaggaaagagaacaaaatgtctactataaactggagtgagctttttttggcttacatttccatgtaggcttttaagctgtcagtgcaaccctgagccttataccacttttaagtactcattgctcttcaggaagtggaaatctagactacttgaaggtaggggagctggagtcttggaaagagatagttcctagaaggaccagagaccacagttccaaacccatgagctgtgctaacactctgttatccagataaacacatagaagactggtagggttggactccctttttagtgatactcacaacacaatccgagtacttgtgaaccatactattggggcagccccagagcctcctggtctttgagtctagaatggggcctaagagtgtacaactctaaggagtttctagagctgctgctgctgctgctggtgtccgaagatcagtctgggactcactgtactagtgcagtgggagaagaatagggacactgatcaccaagtgaacacatttagtaggttttagggaagggttctgctgttttaaaaaatgtgcactgaatttcagttcagagactgtttcttaaatgttgggccttggttgaagtgatacaactttactaaataaattgaatgtatagtatggtacttgataaagactttttacaaattgtgagcatgtaagcaaaacaaaactatctccccttagtccatacattatgaccggagcagcttcttgtttctaaggaatggtttgaaaggatacacagcagtgaagtagagcccagcagaagcagatccccacagccttgtgcactgaggacacctcaagctgttccaactcactccttggctatttacatgcttcagacacatcctgtcattaactctaacagttggtatgagattgttttcaggataaagaaaacatcttttttttttcctgaaggaaactactttcttcatatttcatgattaaaagcaaatagcagctcgtacataaaataaatgtaaaggtggctttgtgtgcgtgtttggtttgatttgttaattgtaagactagcttttacagtttgatgctactgtcattaccaagcatgcagacgccatgcaaatgccaggttaggagcttctgaggttgtggcttaccaagttataaaaggaactgagggaaaggcttgtggagagtctatgtcatgccacataaatagatttttgttaatgaatgatagaatgtgtaaaatgctgcagtatttttgtcattaatgtgatatttattctttaaataatatattatcatgaatcatgtgttaaaaagcaaggcacttgcattttttttcctagaaagaatacttgctaaaattaaaagaatagatgatgctaagactggtgctagagatgcaattagagtgttcactagctggactgtgtaggctctgggtgctttacactaacctttcaggctctcacatggaacctttggctctcacatggaagctcaaccaaagaaaggtcaatgtaactaaaagagagccggtcacagttactcttcaaccttccaaactaaaggactgacctttaaggcaagagctaacacagctcaaagaatggcccatgtcccatcaaatactaatatttctagtcagcatgttaaagttaaccatatccatgatagtctttccagactaaatatccatgtatgtatgtatgtatgtatgtatgtatgtatgtatgtatgcggttttcttttaaatctcagttaactgtgttagcaatagcttacgaaaatatggccatttcattttggctgacttatagaacactcttgctactagaataggagaaactagtaataacgttgccaggaatgctagccgacccgaggtaaggcctgaagtctcttgttgcagttcaaaggtgtctgctctcttttctagagtgtgctaatcccttcaatgaatacgagaaaacttcaccctttcattccaagacctacttcaaattttcattagcagctgggatattattgataaaatcaatgcagatgataaaacaacttcatagacacatcgaatgaccacagaggctcattaatgtgatgaaagcaacagagcaaaccatgcaactcattcccaagctcctcagtgattaagcaggtttaatccagtggaaactggttactctcgttaaactccaacttgagtaatttagcaatacttccacttttgttgttgttctctgacatctctctctctgtctctctttctctctctctccctccctctctctctctctctctctctctctctctctctctctctctctctctctctctctgtctctctctcttattcccaagctcctcaatgattaagcaggtttaatccagtggaaactgattactcttgttaaactccaacttgagtaatttagcaatacttccattttgttgttcctctgacctgattctctctctgtctctctccctctctttccccctctctacagctaaggcgacattttatgttggctaagtaagctatagcttttgatctgacgtttgttactaatggaaacttcatcctatttcccatgctagtcagcatgttaaagttaaccatatccatgatagtctttccaggctaaatatccatgtatgtatgtatgtatgtatgtatgtatgtatgtatgtatgcggttttatgtcacaaatttaatgtcacaaatgtggatgtcgtatttaattcccacctcttgttactcagtcctccccaaaatattttagtctttgttaactataaaaattgaataagcctgaagtattgcaaagttctaatttcatgactgggctgtcatggctgtgtgtctgggagtgaggggctgctctcagaggtcagagaactctgcaaatgcatcgagcagattagagtcattcatgtcatttgatttgcttttgcatatacacaacacaagtcagtgtttgttatgactttcctgatccttatttataagacaatatccgaggaaaccatgtgtgtatgtttgaaatagaaatgatacattgcacagatatagttcaccactttctaggatgggctgtcagtgctcaaacagggagccttaggagtcagaacagatgctttcttccttaatggccctttctataatttaaaatccttccatttatttccctaagatttagtgataactttaaacactttaactaaattacccagcggcttggcagccgtcacggaggcaaatctttttagagattgtagcaatctgttagatcatggatactatgatataaaatctgcatgctccacatacaaaaattaaatcagtgcaatggatacaagcacatgctgcaaatggcaccacttccaaaccaaggggacacgacctgtctccaaatattgaatttctgcagggttttcagtcagtgactttctaaatttgaaccaatttattctcattatccctaagtaaacctactttgatttttaaaaaaaaaaaaaaaaagctattttataatcaaatagagcctgtcagccctggttcatggatcctgatgttgctaggatgcatgatttggtatttgacgaaagtatatcacttcaaaggggaaaactttcaagtgtcctagaaaacgacactcctgtcttctaccacagaagacaggcccaatcctggagcttctctgaagcttacagactgcaggattggcctccccaggctttgaaataagcttcctgtgtggaggactgttcaattgctaccactagtcaagatggtcttaaagcaaggaacacatgtatttataatgaaacacattttcatattttacagtgaagagaaaaaacccagaacccccagactttatgtactttgaaaatatatttaaaaacattaaaaattctatatttaaaacatatattatatgttaattggtacacttaaatagaacctgtatttacaataggcttctgatgtggttaagttttaatgccaattttttcaataacataattatataaatatactaaaatacaataaatattttttcttgttttacatggtgaataatatctttaccatagagagaacaaggccacagacatttacttacagtttcaatgggaatcactataaaaaagcaacaggcctgctgccatgcataaaacatttctgccaacaagagaccacagcaagactttaaaaccaaaacagaacagaacagaacagaacagaaccagaacgaacagaaacgaagaagagattttaacaaataaatctcaggtcaacataaaccaccaacatgtagctatgatgtatcttagtgggtaagagagccagccactgaccacacaattgctgatgtctcctgtgaagccgattaacagacctggcccttgcagtactgtaagattgtgatggggatccttttgtttgtttgactaatgtctctcagaatgaagctgcaaaaagttaacatagagcagatattccaagcattcctgaataggttaaaaaacgatgacaaaggttaatttggtaaacggcacaaaacaatctatgctacatgaagtctttcaaaaacagcatattcagtggtattccaaaagacaggctaactcgaaaggaacgaatgaacaaaaaagaaactatttgctgatggtatcttcactccctgagtcacagcggacgtccacttctgtttcctttccactcctaagatgaagcgattgtttgcctctttttttttttttttctgatgctcaggaacccaggagagtaaccactaacacattcacgcttgaaaaaaacctgactagggaaatgggcttaacactagttctcattgggtccattcattcaggcttccaacttgacttctaaccccaaagggtaaagtacagacgggactcttgtaataaattggcaggagccgtctgtgctcttcactgaagcaatatttcctcctgtgttcttgtctctttcacagtgaaagcaccttgctatgtcttgtttttctagccctttcagacattgctcattctgcctgagttttgatgctttttctggttttgtttgtttgtttgtttgttttctttttttccttttaccaaaatgtctcaaaaataaaaaaataaaaaacctaggcttcctgaagtctaagctcaaagcaaatcaattctcttcacagcaaacatttcccatcatgctgcattaatatcattattgctgtgccatatttggatccaaagttgctccaggttaatccaactttatacacaattatttagaaatgggatggaggctataaatggatttgagtgtggttctccaatcgagaacctcttgagcactgttaggtaatgtaggcacttaaagcagaaggcctaagcaacttgacacatcattccagagcctgctctgaagggtgcttccgagccttcctttaggaatgtctcaagtaccattccccacctccatcctagaccttaggatggccactcagaaattcctcctgcactgccaggaaatagtatgtcagctccacttagcctccgcagggccattcagtcctatttcaatggcagtgtggatccctgctcttatctaagtatctgggtgtatacaataacttttatctgcaaacactgttaggccatattacaatttacccaatatttatgccttttaaaaaaagaatattttgggttatttttatttgtttttctttagggtaaaaaaaaatcactgttttccatgagtgtcataaaatgacacacattgttcatctgtttgtagcagtagtaaaatattttaaagcgcgcaacttaattttctttcttaaaacaaaacaaaaagaagggaccaaaatgggaggagggagggaaagagtatgctttgaacaaatgctggtctttccaataaaagcaattttccctgacccatgccagaagagtgagctgagggggaccagggagatacatcatgggcagtggagtgtgagcattttattcagttgccttaatttttatttgttttccagtcatctgattggattttgcaaacatctttacaacatacaaatgtaacgctttatcaaccagaatggatagtgaagaaattttctccatccctactccgggtggaactaaaaaacaaaacaaacaaacaaacaaaataaaacacaaaacaaacagaaatctacccctcccattccccgtcccttacgccagtaaagcaatgacaacagcaccttgacattgttttaattccaacgctatcagaagtcgaaagcagtaaaacagagtactaacaagaacgaagatacttagtgtctaaaatgtaaacggaatgttttggttccaatttttgtttttgttttttgtttttttttttttgttttttgtttttttaatctgttttctgaaagagggacagtttattatcaattcacaattaaagcagcatgcaatttattattattttttttaaactttttgttttcaattcttggcaacggcaacaaaccacaacattatcgaggaatgtaatgcagacttttaaagttgtgcgcaaatgactgtttcctttcaggtcatggatatgtccaataaatagattgtagaaccactgtactgtataaacttcatttatacatgcagttcataaaattattttttcttaactgaataatttaccctgttatgtatatatacaaatagataattttgtctcaatataatctatacaacataaatccactatcttccccttttaatggtcagtgtacatacacaggaagtgtctatccttatgaatcgccagccaattctctttttgctatccatagtaagggcccgaacatacgattgggtagttcggcattgcgagttccagtgccttttgtctatgcccctgcagccttccttggtgtaacccatgggattacacttggtctcgtagaaatactgcttcagttggcctttggataccgggactttctctaggactgtgaccgtcccgccagacatgtccactgcagtctttttatctgccgctgtgacccactcgctaatactgtcacacacgctcagctccccacggcgggcagggtcggagtggcgccgaaccctcatagacatgtttgcggcatccaggtaatttttgtattcctccagcagaaagagtagaggaggctccaaaggcacttgactgctgagcatcacccgggaagtgtacaagtccgcgtccttatggttttcttcgttgggccgaaccttctggtcctcatccagcagctcttcgatgacgtgctcaaaagtgtcagccagtgatgtcgtcgtcagacctctcgaacctgccctgggcccattcacgctctccagagtcccatgggtccgcacacctgggtaggccaagttgccttgtccgtggacgtttacttctttcatgggcgccgccttcatgcaaccgaagtatgaaataaccatagtaaggaaaaggatggtcatcactcttctcacctggtggaactgtgggaaggaagcagagacagacacagaacaggttagaactttctttctcggggacagcatgtggcccatctgcttgtaatttcagaccttttttttttttttttttttttttttttgtcttactgatccactccagctgcaggggacacaaatcaatgtcagttactgtgctgtatgtggcttaatataaaccagagacatgcaatgttttccccaagatttacatgtaagcctgagagtaaacggtttctaagcaagtgaacacactgtggcttccctgctcccacttcctcccgctttagcagctttgggggtttaatttttaatgatctctgcacacgctgtcaccagaaacacaatcacaaatgttactaagcaacaactgcaagtggaatagtaatcttcctttcaagtcagcagcatagtccttgggaggaatgtgtgatggaaacggtagtggctagagggctgggtgtctggtgctctaagcagtctgagcaggagcagtatgataaaacagcggtcggtcggaatgctgggaggggccttttcctcctagaggcgatgtagaccaccatgttttgcggataaggaaccaaaaggccacacaggacttgcccggtctcatgaagaaacttaaggaactagagatcccatctccaacgttttactacatctgtgaaggttttgcttatttccaaacaattcattttcaataggtttgttctaatgacatgcctgaggcagggatgaaaacaatgtatcttttaagagaaagctggaaagctggaacagtcctcaaggaaaggcattcaagtcaggatcaatgcctttcacgagcagacatctctccagactcagagggcactttgatggcttgttttggcaaaccacagagagctcagcttctcattagcagaactccacccccttctcaagtgtgtgtgtgtgtgtgtgtgtgtgtgtgtgtgtgtgtgtgtgtgtgtgtgtgacactgagttgtcatacctttacaaagctgagtagtactttacacgcttttgaattggcatctagtacttctttctgtgcatttgaactttcctacagagtcacttaataacatacctcaaagttaaatttggcttgcatctataagcatactccgcaaacccaactaaaattgaataacaagcaaaattgacacatacctatggaccaaaccaagcttacatcaggtggtggaagacttctgaattacttaccggaagcattctgcctcttagtagtaacgagtagcatctctttaactctaataggctaactttctttctacttattggctgtggaacatagacttgtaaagacatacacactcagcattcattatgcagggtaagtccaccagaaggaagcatgtttctgctcacaatgagatgctgaacacaagaacaacctacctccagtgaaatagggcacagtgcacagacagcttacgcaacacaagctatgggaattcttgccaaagtgggacattaaagctctttccaattctacagtggcatcaccattatcttgagactcttcccctcaggagagcaatgcacataacagtttccgacttcgtatatgtgcacagcctccacacatcagccacagtaagagaagttgtccacagagctagttactcaagcacagccagacagaaggagaaatgagtgaaacaacatttcacactcacagtcaggcaatggtttgagactagtgcagcatctctctgaagaaggcgcatatcttccttccccaggagtctggacactgcctaaagctgtctccgctgttctgcacagcatctccattgcttgatagccacctcacccttagccaagggtcacttgtgtcctaggaacttttgttattgctgttttctatagagtatctttgcagccttgagcttggacatgatgaaccggtatgagtttgtaaattacccagagaagattaattcatgtttgcttgcttgtgtgttttatactactgaccagcaaaagtccaatatgaataattagtaatttggagagagagagagagagagagagagagagagagagagagagagagagagagagagagagagagagaagaactgctcggaccacatggtaatttaaggttagaaaggcaaattggtttgaggaaaatatacctgttaattctgctgatatctaaaagtttaggagtgttttgtatccagcaccattacagaaatggaccctacatggaggtctctgatctgggcaggtggtacttataccattgagggagacttttctcctaatatcacaagtctatatttaaagaactcaaggggatcttcaaatttagaccaatgaaataatacatatttaaactgttttatattggtgcatacttttaatcccagcactcagaaaacagggacaagtggatctttattaattcaaagctagcctatcctacatagttagttctgggctaaccagtgagaccctatccataaataaataaataaatattttagtcatctatatcacattggtgaagatttgacattatatgccatgttttattttcatcttaaacacacacacacacaaacacacacacacgccttaggtgcattaaaaaaaatcaatcagaaaaacaaaagaaatggatgaaggcaatggtagggatataatgattggctgaccaagaatcacaaggtgatactacaagaggacacaatgcaatctgacatgttgaaataagcagaaggtgaattttagaagcaatgagatgtcgattttgtaagcatttactaaaaggctgaatgcttttaaatggttggaggcactgaggcatcttagctgcagagctagagatttgtctcattactgttacaccaatgagtcttctaatgatacattttatatacttaatgaggtttcctcagcctttcatggctcttatttattgtttttatgggtaatatcctgataaggaaagcacccaaggctccggctatcattctctcagcaattctgtaagcacattccaagtgcacagttgacatctgagtcaatgtgactcggcttcctctctaagtcaacacatagctttccttccaggctgagcatctaaagagataatgtaattagctaggtggcaacatacacagctccacgtctctgatcccctttgagtggtacttcagcaattcttttggcctatttgttgacaaggctttagaagatgccttgaaaagtaactcggtgcttttatgtgagcacaaaggcatgacccacttttcctgtttattgtatgtttcttgctatgtcctccaggatggttggctccagcctcattccttctgtcccagcttctgaagttctgggaatacaacatgtaccatcatgccaagctctactttttgaaatcatggctcctgatatgttgggcagccctgttgtgctttgaagataaaatgctccacaaagacccctatgtttaaggctcagtcatcagctggtgtgtactttgggaagtggtagaaaccttaggaagtagggttttggtatagaaatcagtcagtggaaggtacctgagaagggtattttgtccttggcccctttctctttgctttccaggttctgcaaggtaagaatcattcctctactatgcccttcccctccatgacagccatttgctgagatctctaataaaccttttttcctttcaaccttttctcttagatacttctgatggtgacaaaacctaatgcaattccagataaatctcatcatccaaagacaaaggggtcatgtggcactactaagtagatcatcagtctatgtctacttatatttaattcactgatactaatttttccaaggcttaacaacaatcaatacctagagagttctaggaagactttcttagcctcatctcagtaaagtcagtataatgcatgctacattaaaaaaaaaagtaaaaagaaagtttagttagaagtgtgactcacaagacctaaaatccaaccgggacaatatgcatgatagcttgctcctctactgtagttccacaacaacttgtgttgactaaaagattgcagaacattcataatcgtcatcaaattggattgtcacaaagagaagttaagttactatcatcgtgatcacacagttacagcagttacacttctaactctgtcaaatgtcacaaaactaacaggtctcctcacccatgtttttgctaccagaacttaatgccagttttagaatattaatcacagggaagagaacgtgtatggcaaggagggagcttacaaaacttgggcaccattttctatagttatatatcacagagttatagatcacatatcacaaaggccagctttctaaagccagcatgataaagatactactagaactgtttttaatcattgtcatcatttagatcttcccctcatgagttgaagacttggttctcactgaagctaggtgtagaggtgggtcttttaaattgtgaataaatcatgagggctctgatctcataaatggtatatctattgatagattaataattaaatggtcaatggggcaaggtagaagccataggaaataggggctatgtgacattctgccttgtaaaggcctagaagcagtggaggcagttgatcatgaagtgaaatctctgaagtgtgagccaagaaaagtgttttctccctttaagttagtcatgttagaactaaattttcatggacaaaattgagaagaaacaaataatcatacaagcaaatcaggataatggggatagaggcctatacaagctttatttattcctaatctctttgtcttgtgtatgtaagcagaagaaaacacagtttcatgacaggttggcttatcttagacagtcttataactagcaaggataatgataatgttaaagaaagaccagttaatgtttaattctgtcatacagggtatagacctattaaaaccacattgtggtagtttgaatgtgcttggctcagggagcagcattattaagagatgtagccctgttggagtaggtgtgccattgtaggtgtgggctttaagaccctagtcttagctgcctggaagccagtcttctcctagcagccttcagatgaagatgtaaaactctcagcttctccaacaacatgcctgcctggatgctaccatgctcttgctttgatgataatggactgaacctctgaacttgtaaggcagccccaattaaatgtccttataaaagttgccttggtcatggtgtctgttcccagcagtaaaaccctaactaagacagaagttggtaccagggactggggtattgctgtaattggtctgaccatgcttttgtttggaagaatgtggattttgggactttggatttggacactagtggaatgctttaagtcaagcttaatgggctatcctagtaggagtgtggaagactttttttgtgagtgatttgaattatgcagaccaggcccaagaggtttcagtggagaactttagtatgtggcccagagactgttttgtggtattttgatgaagaatgtggctgctttttgctcttgtctaaagattctaactgagactaaggtaaagagatttatattaaaattgcattgacaaaggaaatctcaaaacaaacaaacacacacacacacacacaaacaaacccagcagagactttgttctctgattaagtctcatgaagagtgttttgaacaagtgtaataagattagaaaggaaaaataccaaaaatatggtattaaagaggcaccaggaagtgaaatggagctgaatcctgtggtcaaggatattaagttgaattaagggagtggtgacctaggggcacccagctaagtttaggtctagaccaggaggcaaaggcaagcagatctctgagttcaaggccagcctaggacagagcaggttctagatgaagaaaaacttcagtccaggtgtggtggtatacacctttaactccagcattcaggaaacaaagtcattcagatccctgagttcaaggtcaacctacaaagcaagttataggacagccaaatttaggcagtaagaaagctggaaaacagaaagctgggaataaaatgtaaggggtcaggggtggggggtggggtggcatcttccagccccagcaagcagcagaactctggcagctttgtccatgtggctctgactttagtgtcaagtatagaagggactactgggacaactggtgctagttagctggagctaaaaaaattagtggtgattaagaggagaccagaactactgaggtgaaatctgggaagtcttttctgagagcacaaaaaaatctctgttctagagacggccaaggttgtaacttgtgcttcagctgtacttggtaatgtgtcagagtcacccaggtggtactgattttgaaggtatgaaggggtcatggtgagcagctgaggcttggcactgtgagaggccatggaaggccattgttgaaggatcaccctcagttgcatttgatgacccaggactgaaggagtcatgcaaagaagttgaggcttggtaccataaagagatcctatgagaggctattggtgaagcctagttgcagtgaaagaccccagcatattgaagatgccatgctataggatgatcactaagaacagtagcagcagtggagtggagtcaaccagagcctagagtgctacagaggcagagctggaggtgtggcccaaggcctttggatgaggttagaagataatgtgtggatcccagacattggaacaagaagctgtaacattaaagttgccttggaaaccccaagatgtttgagatgagccttggaatatctgctgaagaaagatgctaacagagagtggaattagactaggagaaaaaagtttgtcgcaggcagtcaacaaaaatgaaaaaaaaaaaaagttggggatctgaagactgctttcacatcaacccgtaatttggagtttgcccagctggtttcctgtcttgctttggggattacagttaagtgactggatgggtctcaaaaagaaactttgaacttttaatgttgttgagaatgctataggctatgggaacttcagaagttggactaaatgtatttttttataatgcgattgctaggtatggtccccataaactcttgtatttgaacaatcctatgggggccagggagtggaatttggtggtttaaatatgcttggttcagggagtggcactattaggaggtatggccttgttggagtaggtgtacccctgatggagtaggtgtgtcactgtaggtgtgggctttaataccctagtcctagctacctggaagttagtctcctggcagccttcagatgaagatgcagaagtctcagcttctccattaccatgcctgcctgcctggatgctggtatctatgatcctgccatgatgataatgaactgaactctctgagcctgtaaggcagtcccaattaaatgttgtctttataagagttgcctccatcatcatgtctgttcacagcagtaaaaccctaatacactaatgaaaatctgaaaaataacatgaaaaatctttaactttcatctgatttcaccacattcatatatcaacctcacttctgtttgttcaattataaggcaagggatctagtttctagtttcaatgtctaagaagaggttaagaccattgtgtgactttagaaaaaagacaaatgatccagggaaggaatggatgaaattttaaaaagagagagatgctctttccaggtaagaaatgaagaaatgctttgtgaagctttcattggattcagagatctctgtataagatagaagtaggtgacaattaaatgatgaacggatttgagatgagagaaggattagaattagaagatggaaaaaagagctctggactagaagtggtaaaaacaagaccaaacaactgcccaaattcattaaggttctaggaatgatggcaactgaattagatgctgctttatgggcactgaagatcctagaagagtttctaaacagagggaggtgtttaacatggcacacagaagacttcaaggagtgacaaactagactacattaaataaataagttcaataattgtattcttattgaatagtgagctttaaaaataaatactaagtagttgtttacatgtggaattatgggtctggatcaatctctattgaaacatgctttgaaagggaaagtggttacagtagtaggcagagttaagtatcaatcatcagtaatgtttggcttggcaaaagaataggacatggagagagattgggagaaactacaaactttcattccaattataactgtactcaactttggttctatggctcagcacttttaattcaaagatctccaagtgctttgcaaatattaagtaattaagactcataggacccaagagatgcaggtaactataattatccccattttgtgctggaggaaagagatcagagtttttaatcaactcatccactctgtgtggttcccttgatagaacaaggtcagaacctagattctgaatctagattctagaagtttagccttacagtaaaggcactagtttgtttcatcaatctacataattttcatgttattttctcatgtattgctaaaccaagaataaacaaaaaataaggcaatgctaaatacacccacacattcctcaaaggagataattaaagttgaaattcataattaaaatggaaaaacagaatgatcataacagatattcacctatttagctggttgtccatttgattgaagataaaaaataattttgaaaataatatttgataatgtagatgtttcaaagcatttagaagtacctttacaaggtaatatttaaatattggtgtcttaagatattcaaaggattaaatttagatattaatttgactagattaaagaatattgttttgaggtgtgattgtgtttccagaggagattgtgagacaagttgatggattgaataggaaagtctgccctcaattgtgggtggatacaatccatatcattggctgatgcccaaataaaacagcaagagaggaagggcaattggctcctcctccccataattggttcatatttatcttttccaatacttattgtcaataggtacaagttctgatgttagacaccggaagtatcagttctctggagttgtatgagtggattcttaggctttgtgccttcagacatggatcaagccatgctacagtacaacagggtctgcagcttacagacagcatctcatggtgcctcttgcccttcataatcatatgtgccaatgtctgtattatgcgtgtgttcaaacatctatatctacattggtactgtttctttcaagatactaatataactttctataaagcatagtctttcataccagagtactctaacccctggtctggtttttccatggcattaagtgacacaaactttatttaattgtactaaaaaaactgaatagtttattagtctataatatgaagtataggttaataccatgagaaaaatgtatattttcctgaatcattaatttgacagaaaattttactggtatctttgataaaatactagccttctgttaccttcttctcctctcccctgacataaacaaacaaacaaacagtcaaacaattatttttctattagcagaagacttatctttcttttgaagcaaaactagaccacatattccataaggacagagaccaagcagtctccctggaattcttacacacagtaagttgtacattatattatgtcaactggactctctagctactgaatgatttaataatgtttatgctggtgctattggaatgatatatggggaagtttagttaaagtatgaaccataagttttagtatcagctgaaatgattccttggatttgggaaggagtaaaaaaatgatctaatagaaagaccagctctgggcagagaattctctaccttgacatcctagtcttaggcacagctgccaagttccagaggttctaagtactgccattaacatcgcctcaggcaacctaatgtttcccacaatcaatggaggtttctgaatgccgaagacccctagcgagacctgttcctacctgcccttctcctttgcctaagcagtacatgactctaacaaatgagccctagtaccaagcattcctatctcatttgcatatcaaatgtgcatttctaaatatcctccggaacagctatttttaattatagggcccaactggcagctgacaatcaagaactaaaattgttttaaattaggattttattttcttccaaaatcctggcaggatttgttactattcaccctaaccacgtattttttactaaattcttgtacatggtagacaaatattattaatttcaattagtgtcattatgtgttattgactaattatgtaatgtgtaacctgtagcatcacatgaatatcatatttaatgacagatgttcatcaactatatgtaatcatggatggaattttaaaaattattctattttatatgtatagatgttttgtttgcaagtttgtctgtccaagagtacatgcctggtacccatggaggtcagagcagggcatttaattcccttggaagtaggaagttccaaggttgtaagacaccatgtgggtactgggaactgaaaccctggtttttctggaagagcatctagtgctcttaactgctgagccatctctatagccccataggtgggatttttatgacagcatgatggctttgaaagtaaacagggatgtaaaaacatcttcagcatcacttagatgcaagtaaactacaactaagctgtatttaaatatatactttgaatttatgtaaaaaaattcaaagttgaaattaattttatgcagtctaaagtctcaaatatcaggtaacacttattgctattaatgcaattcaaaattgtcagtacaggcctaagaagagagctcagtaagtaaaacaattgttgcacaaactgaaagatctgagtttgactcttcagaacccatgtaaaagccatatgcattgtgtgagctttggtaatttcagcatctccatgggaagatgatagacagagacaggaaacccaccagaagcatttaagccagcctagcatttatatgcagcagtgatgagatctcatctcaaacaatgtagaagatgaggacaattgctcagggctgtcctatgacctccacatacacaccatagtacccatgtacccacattaacatacatgactgtgaaatcatacagaaccattgtacattcaaataatgatatagtaataatagaaacttgttaagaaaattgctccaagaaaaagaagagatttttgtaggacctgaaattagagttgtaggaaatgcagagatgggacaaaattcaatgtattcaaactaaatgagtccttgcttttttctaaagctgtcatcaatgcccaagctgcattggcattaccaaggagctcatgagaaagtcagcatctcagctttctctctctcatcccaggtatcctacctagtaccagaacctgcatttcagctagatttagatacttcaagtagatttataaactcatcaaagctgagatgtaatcgagtaattcatacagagaaagtcagtcaaggaagataaggaaagaagtggacgacatcaaggtgagcactatggtcctttctcagtatgccatggagttacctgtcatctcctctctgactcaacacccactgtatgtgttttgttgattttgtaatgggtttaagtaaaactttggctctttttgtcaactggcttttttttattctgtccatactataaggtacaggatacctataaataagaattgttacatgagcacttgtagtgtaccactgatataaatctggactgctattcaattactaatttttcccaagtgctatgaggcaaatgcaaacacatttagctctcctaatcacttcgcacagtctgatatcacccactcaatgagaaccatactggagatgacatgactaactagatctgagagtagatttccaagcactcagccagatgtcaaattgctttcagccagatgtctctggtcctttgtgttctgaagtggtaaaggggagtcagaagcagagagaacatacccactcaggcagattttttaattttagaattggtcctgaagccaacagatttcagctttttcataccatgtgtacatttcatagaccatgaaattaaaaatataattaaggtttcactaaaacagtgacaacagtacccatagtatatatttgtgtgtatgttcatgtgtatgtatatgtagcaggagtcaagaatcctttctcaacttcagttggactctaaaacagatgactagtaactagacagcacaatttcttggtaagtatctaatatttgaaattagttgcttcaaggcaagtaccttaaatggcattttaaaagttaaaaatgaaagaaatgcttaacatttttggaattgaacaaaaatatgagggagttgtcgaaacaattttgtaaccagaactggagactagcccactgttgaactcttgacaaaagattgtgaggattgctagattctaaacatcaagaacttagcagattcacaagtctgcatatgaatgaatgctcagagctgggaagcctggcagcttggctactgtgtgcaaatttatggggcagacatgacactgtcttactttcccaggtggtgtctcagatactgttgagttctaccttgaacagcaggttgaaaggcacagatgtcaacatgctaaaggactgccttttccagtttatattcaagcacaccaccaggcagcggatacggtgaaagataagctctgtcttcttgcctccaaagagtaagtgtgcccttcaccaaaagcaagatgaatgcagttgcattttgtttccctaagggaagaatgtgtgctaactcttagatctgaggatgaagggaatcccctttaagcagtattgtttgctgttgtgtcgactagaaacatttcatagaaattcaaaacaaaagaaacagaaaaaggaagtcaaggcggtctgtcttgcttcaatttcttcttctttttttcacaattagctactttaatcaaactgtttatagagtactgctggatactcctgtcttcctgccattgcagagagctaacagctcacccaagaccactgccatacaactgcacacccaatggaactagagctgtcgtagagacttgtccttgccagcctttatccagataatgctcctgaaatttccatagccaatatattctggtggctatcagcacaattcccaatacagaaagaatatttgtctataattaagtccatattaggaaaaaaaccctgtagccttgaacatccttgattcagaaggatgggtatgttttgtctaagcaagggatgactattgattagaccctgtctattgaagacacaaacaccaagctttaaaaactgaggttaaaaaaaaaatatgtggaggaagataagttgtccctagcaacagaagaacaacattccttttcaaattactatcacgatgtcccagggttggaggagataaaattagcaagagaaggttattagttctttgttgctcacctttacgacaccattttcagcaatcagtttgttcggctccactgaggcgcagcgacacacaccacagcctttctcctgggatgcacagtcataccacataaaagtgtgtgggtagatgccaaaacatgtatggacatgcaacccattctgtagaaactcaactttctgagttattaatgaggattagcctgagcacatggagaaaactggtggttccacacatccagttgtccttcgggttatgcttgcatccaactctataatttcttttaattgcttactgtgatgcacaggaaagcgctcattatttgcagcttaatgtgggaggaaaaataaaatatgtctccctgcccactgccttactccagctagcaacatttctaggtgtaagtgtaagtaatttctgtacactgtgtcacaatccatgtgggtcatattcaagatactgattgtgttctgaactactaacaaatataagaaaaccagtaccatctcagataaaaagcagtctgtactgctggtcagaaaatgccactcccacataagcacaggtatggaagtatacaaacctgtgcaagtagcaggatggtaaaagcctctcctttttcctttcaccaaatataaatgtgtagaggttccatggaaactcacatcaacatatttcatctaagtaatgatgtgatgactctatttctacctactaccaaaaaacagtgttggtagtcgtcatgtgggtggagatggactttagaagatcctctgggcagctatataaatactaagaatttactaaactactttttgcattaaaaatgacaactcaacagttaactctgactaactatgagccatgcaatcaaactaaccacagtttacaactgtggtatctgagacacaggaagatgcatcaaatttgcctatgcccagcgtgatggagatggagcctggttcttctgaatagattcaaatgtggatatggtgtcttcaattttgaaagtctacatagtgaatacataatgtagtcttggtattccacatttttaaattacttcggcaaaatcctatatgagggtttctgaaacatgatgtgtttgaagtctaattctatggagtctgaatttaaccttatggtttctttgttaatgggttattcccttaaggtgccagtcatactacatatttatcaggccagaatgtcaaaattatacatgacatgaaggtaattcattagaggtgtcagacattttttccccctgggaactttttggacactgaaacagaaccatgtactttatagaccactaacactgttaccacatgcttctctgctaactctgctgaagtaagaatgtgaggtaacccaatcacaaaagaactcacatgatatgcactcactgataagtggatattagcccagaaacttagaatacccaagatataaggtacaatttgctaaacacatgaaagtcaagaagaacgaagaccaaagtgtggacactttgccccttcttagaattgggagcaaggcacccatggaaggagttacagagacacagtttggagctgagatgaaaggatggaccatctagagactgccatatcccgggatccatcccatggtcagcctccaaacgctgacaccattgcatacactagcaagattttgctggaaggacccagatatggctgtctcttgtgtgactatgccggggcctggcaaacacagaagtggatgctcacagtcagctattggatggatcacagggcccccaatggaggagctagagaaagtacccaaggagctgaagggatctgcaaccctgtagtggagaacaacactatgtactaaccagtacctccagagcttgtgtctctagctgcatatgtatcaaaagatggcctagttggccatcactgggaagagaggcccattggtcttgcaaactttatctgcctcagtacaggggaacgccagggccaagaagtgggagtgggtgggtgggggagcgtgtgggggacttttgggatagcattggaaatgtaattgaggaaaatacgtaataaaaaaaaagaaaaaaatatgcttgtaacgtaacactttgcttgtctaaatgtctaatactatatggcaccttatttgtgacctttgtactactttttaagattgtagcctaggggctaagatatgcaaagaaagaaaattatgctaaggcaatctcagatgtattcccaagaagtaatgaaaaccacaaaggtggcagaagagatggtccagcctggggccaagagtactctcagggatgagggtgggaggcaaacatcctaaatgtgtatgttgagttagatgacaattagaacatcttgcttctggccattatctgcccttgtgagagaggagactgagagaatcagctttgaggagcttgagaacaaaactggaaatgcctgttgtgaaagtctttgcaagtgtcattaacaaaatcaagtgtgtctttgtccctgtgtctcagctggcatttggaagtccacttatacaccaaaggatggtttcttgtatagtccagacacactcatcactgcaactgtccaagttcaactgttccacagagggaaagaaaatgattttccctttaacaaatccctgtcaaagttctattttagaaaattttattaggtcaggcatggtaccacacctgttattcaagcagtgaggaggcagaggccgaaggatttccacaagttcaaagtcagcctggtctacatcgagcatcccaggccagctagagctagagtgtggtcctgtctcataagcaagcaaacaagtaaggagataaatatgtgaatgcctacttggatcggataaccgctctgctacggttcatttgccacattctcctagggcagcaggactggcagaatttgtttttctaaataaggcacactgtcctcagagaagaatgagaccaagaatcaatccaatgagaacggtaagagttatgggaggatgacctgggatgaatgccattcacaacgtgaagatgttatctaggtcataaatcacattgctttcatatggttccctacttgcataatgcaagaaactgcccggcaacaccgagtatgaagtatactgacagtgcagcccaggtcagtgtttatattgtgctctggaattttaatttgtcataaataagatactaattataaactttgggggaagcacaaaattattcctcaaaagaatatcccatgggtatgaatgctctaagcaggacttctctatgccttgaggtgtatatcttgaagttggtcttggaaatgaggttggtaacggaaaagggaacattgaaacctgggatacagaacatgatggtggaaaagttttcttttctgttccaataaacagctgagttctttggagccaacctcactagttaggtgaataatgaatgtattcttagctttccattacagggaattctgcaagtggcaacatgggtccattccatgtgtgttactagagttggcataaacccatgtccagggtgagacattacatccactgtgtcatagtcccactgaaaaatttgggacaaaataaaagattcaatgtccacttggaagtttctatctatttctcatcttattggaacatactatggacttctcagaaagaaggatgctcccatacactcttagtgggaatacaaacagttgcagtctggcttagaacattttatggagtaactatcaaatttataagtgagctttcctacaatatagcagttctactgttaagaacaagtgtacagacaattgcacagggacaaatatgcatatacagacatcatgtgtgcacatatataccacatatgtggttatggaatacaaaaaggtatataatagaaaaaaaatccagttttcaactataagaaaataaacctatagtaactccttcatatcagattctggcagctatgaagtgcatgctctttcccctgtaagctggaatgaaaaggtctctggaatgcagcgctaagtgtctaaaaccaaggtgtaaaacagtgtgtcacttttcctttagaaattggggggagggaggataatcacagtcatatttgcttatatttctataaagcggacaatactagtttgaaaacagttctatactaatggcaattacaggtgttgtgtgtagggtaggtgcaggttgaggcagaattctttgtatatactgatttttttacactattttgatatttgaattatgtaaataagttaagtataaattttaaactgatcctaggccaagattgtacattctgataatctccatatttgggggatagaggcaggaagatcaaaaattcaaggtcatcctgagctacacagtcagttcaaggccaacctaagctacacaaagctctgactcaagaaaattaactaagtaaccaattcattcactaaatatgaaagtcagacatacttaatatttcaggtttttttagaccaatatccacactggtgtggtgttgttgtacctggcagtctgagttttgcatttcatcttttggtacatttccctggaagaagttagtagaaggtcatgactggaacctaggaatgtgaaacatgaattctgatccttcctcttggatttcatataaagttaatcctattaaatagctatttgactatttaaaaaaaaaaaggaacttgaacaaacccataggtggacagatgtaaggacctgtgcctcaactctgctttgcagtgagagtaagagtaggacccttctgaattctgtgctcctttgaaaaacaaccagtataagggcaagggatctgtgacctgtaaggggcaactctacaaacaactgttatgacacacaatgctagaatgagaggtaagcaacgggcaaacagcggaggggactacgacttgtttcccagagtatctaagtcactaaaataatacaaaagtaagcttgccaaagaaagaatataaacacaaacagaaagcaagaacaaacttatacagagagacttcaagaggaagacgtatagttaaaggactccttatgtgattatcctcaatatcttgaactctgtaaattctaccaggacaactagggaggcagctatagaagaaagaacccagacttaaatataaccatgagatttatgatgaatgaaggacccagtagaatagtccttattctgtgagcagtatagttgttggagcaagtgccctcttcacacaggtggcctccaactgactttcaaaatcagatggaaaacttcaaacatttctaaaaattgtcctctggggaccatttaccccaaattagagactgaacgaaaaaccattctttcaaaaagcacctctcctccaaaaccccttctcatctccatatgcacagtcatctggaaagcagatttaccattaaacggatggtcaaagctgtcccgaaatgttaaactaatcacgaaaatctaagcattgctttcctcaccttcccggagtgaaacattccaaagaagctggaaataaccacatattggtgctgtaacctggggtctactagcagtgctctaactttgtaccaacatccagatgctgggacaggaaatcagctacttggaacccagtaaaagcaagtagagccttcccttctattttgattactgagggccccatgtaaagttcccagttcttgggtccagctgtgtctacgctggctaactcacacaacacacttgtgcacctcccaatgaaatgagggacctgcacttgtgactcaacatatttgtagacctcaaaaacttacacaactttcttaagatcagtgagtaagtcagtggtatgttggattaaatttaatcattagacccagcaacggcactagtattgggctacctcatgcaaattctatttcagaaatatttctgtgatgtgaagaaaatggaatgcactaagatgttctaaatcgtgtttgcaaactaggcattacctccaaaacttctaacacctaatctgacacagacacgatacacaatgatttaatgattatacaattaatcacagtgctctgagatgcagaaaacaactcagtcaaagcagatttatcatggacaagaggctttttttagtggaaacagaattcctgctgggtcttgaagaattggtataattgtatgtggagagagtaatcaataaacaaattcgactcagagaattatggtagagtagacttctgatcttgtcactaactataaagtaaagctcacttaggcatgaagcatgccagggagacattttgctgctttgatgacaaggttctaaaacctcttcttctagaattgggaagtgctaagaatgcagcacagtggtaatgtcaagtgccagtctaaactttacatggattaacacatttaatcccacactaccctctcaagaggttgaggcagagtaagaagctagctgggatcacagactcagtagttggtaggccaactccaacactgggctcaggaatataggctttgatctttgtctcttctttggaagtctatgatagaaattccttctaagtcagaacaatatttagaaggcctcctattcagagcctctgaatgtctgattatacggaaagctgcaaatcttttctagccatgttctaacctaggaatttggcaatgaaataaatgataagtccctgtaaatcataggctattcagcttacatggcttctagtttaaggatctcaagtgtttctgtatggttgagacaactgtgcaaattgctaagcatagcacagacccaggctcagtcttgcattcaaggacttcacctttatattcttaaaagtttgaaaggcatttctgatggtcaccaggtttgggaatcagtgttccttatgtccattttacttatatattcaatatttcactcgcccaaatccccagctttataaaatatatgccccaaatcctatatccattttccttttgttgttgttgttgtttttatttaccaaaaagtaagataaaatgcatttaaaactcccttagaatacctgttcttttctggattcatgattttttggtttgctttatgacccactgagtttaactcaggtaatctctgtgacacgctggagtaacagtaaggtgtgtgtgtgtgtgtgtgtgtgtgtgtgtgtgtgtgtgtgtgtgtgtgcatgtatgttttggggcatagtgatagagatgtgaggttataagtaatgtgggaacccttaggttttgcaaaatattgattataaagaacaaccaaggtggagggggtgaggatgtgtgtgtgatacccagagtgggggtctcctctcagaggagaggggagacaggaatgaagaaggatctgggagaaaggaggctgatattgggatgtaaagtgaataaataaataaatttaaaaaaaaagaaaagaaaaaagaacaaccagagggtgtggagtcatcaaggaaatcattgccaggaccatgaagaccctaaagaacgaggtaggtcagctgtgtttccatccactataaacaacattttccaaaattctacaatgggaagctttgaagatttttttttttaaaggaaatctacctcccagcttactgctttctgcatactctgaatgaggagacagatgtaactctcaacacaggaaattgatgtaaaacatggtgggagactgacatcaaacagaaaaaataaaataaaatcccaggactaccctgctatggacctctagctactgacctactgccttctgactgagaacacgttgctttccaagagggttttatgaagcagagtgtcatggatctctaggagagcagctgaggctgaggggaggagacaacatgctacatgcatgctctccaactagaccagagttacttgtttttcttcccaatactggggccctgttatgatcttattagggaaattttgctgaatggtacagtatagtgctttttaggctttatagcatgaaattagaggataatagacatgtttgtcttttttattttgtttcaaagaccagattaataaataaataattataataaataaataaataaattaagagacacgagacgataggtctggtaccacatagaaggccagaccatttatattttactaatcatatgagtccctccccacctctttcttctttcttctttttaaaatttacaaattaattatgtgaatatgtgcttccttgcatgttggcaagctaaatatttctaagttggtgatgccagttacgctgtacttacatagttataaaggcattgcccagggacataacatatatcttaacatcatagatatttgagcaaaatcacctcctgaattcaaaattaagtaagcaaattattggtttctccatttgtgcattatacttctactaccatggccaaaattgcactagctctataaacagctccggattatactatggtcttacattgaatgtgcaattatttaaaactcccaaatttctccttcttgacatctgttgattaacatcctctaagttcatacccctaccttcctattctgttctgctgagtttttaaaaaatcaaactagctgagatgatatagttcagttgtaaaatacttgcctcaaaatcacaagggccaaaaagttctgtcctcagaccccatacaaaaaggacaatggcatctacttgtaatcccagcactggggcagtggaaccagagggatgactggagttctgtgaccaggaagcctagtgtagtgggtgtgttccaagtcaagaagacacctcgtctctaataacaaggcagatggcatccctaagaaatgacacctaaagttgtcctctagttctttacacacaaacatgtgcacatgcatccacacacaagcacatataaacatataattcacatgcacacaacacccacacacagaagttaattacactattttccattaaataaatatatatgatccaacttctatctagcagcagaatgtctgcagcgcctgttggctttatgttttgatgtgataagcatatcgtctgtgccttcagacacatcaccagccaacatttcgtgctgggtgtgctttccccatgttgcataagagagaacaccttggagcctttggtctaggaatgtggcctgggactctgccaagcatctcccttcagcatcacgattgtagatttctcgacctttagattctatgtgatataacagaaagtagtctatgtttaaaatcacatccaagaaataagtgcacacatgaaacatagagaaacttgtttcaatttgggcctagtttcacatttcaaaggcataggagcccacagaaaatataatctctgagacagaaactctgaatacaggaatgattagcaggtggcaaaaattactgaatgagcctccctttcctgtctcataaatctgtcctccttttcttagggagttgggggtggggtggagggatactttctttcttttttattttttatttttcctgaataagaatgttttctgattgctcctagggataacacaaagcatccagagtgcagttactttctttggttacaatgatgtttgttctttcttactacaaactggcacacattaaatatatactttattcagtccctaaaatacacagggaccagcatctccacttgccccttaaaacttgaagacactaaaaaattccaccagtaagtttgcagtttctgtctccatcaactttaacctatcaaattttccaggtataatttcatgagtgaagcaaattatgcacaagaagttctataactttataaacggtttttataaaggtgctggggaaaataaatattatcaaatatttcctccagtttctatctccctgccagaaaaacgttgatcaccttgtttttttcacattaaatttcacattaaattctttcatcaactacattgacaactcagaatctcaggtaactgctaatgaatctatctgctccttcaatcgctttatcaagtgtgtctgggtaagactcgctctgttctgatgctgatgtggaatcatgcagaggtacactactaatcaataacataaagttttgtcactggggagaagtttaagtcaacttataattaccggttccttttttttttaaatcacattttgatgctacttattcgtaggtagagatgatctttatcatttcttgttgcctcttttattttccttactttgagggggaagggtgcaaggtgggtagaatagtgtttaaaactcccactctacttaccaccctctattttattcttaaatcttctcaaatcattaaagttaaaattagatcagagatgaaagatattccttaagatcttcctacttcatttatttggtgttattatatctcagaaagtggaatgaattgccagtggcaaaagggcaaaatcaaaacctttgcattcagtgctacagtataaacccttgaaaatgatgagaaagagagagagagagagagagagagagagagagagagcaacctttgattcccaattttacattgactagcatgttaaagttcttaaaggttagtgtaaaagttgagctgtggagttgcttgctttaaaatccacctgcagagataaatgttacctgtctccctctccccttcacacacactccccaagcctgcacagggtgtcaagaaagggaggcagtaaagattgatatggcaacaggatgacttactgggaagtctggggaaattctttagtaggtactatgacttcaatgtttaatgaactgcttaaattaatttgaaacatttatctgactttctattacatacttagcaaatttcatatagactagttgaaatttaaaaaaacaaactgattttggattaaaaagaacaatctgaagtacagtgacttaaaaaaaatcatgtaattttttttgtatttcctggttatattgaaattaggatatcctcctttgcctgccttccctccaaaaaatgtggaggcatatcaaaaccacagaaggtcgtcataaaatcccagtcagaccaaagcaactgagatgaaagcagatttaaaagcgccaaggttctgtaagctttcaaaatcaggacattacgaccatgacaaccaatgaaaagttctttcaagtgaacctttggggaaaactacataacattcattactctctgggaactttggaaataaccttttactttattatgcctgccactgaagcttgtaaatttatgttactcccctcgctctccaaatgtaaccatccttgaacttcaggccatgtataaatgaaacttcaggacaactagctactccatagccatccacaatgtttggtcagatttacctcaccaaaggtgtgtctcagagtttgtagttgcactttggtacttacataaatgaaatttgccatactgcttgtaattcattctttctttcatctatctatctatctatctatctatctatctatctatctatctatctatctacctatcgatctgatagcattcccttcccccttaacaattttcaaatacccatgcaactactgagtttcgtcattttttttttaaatctatcaacaatgactccattattcagtaattgggtccataactttctgaagttttcatattcctgtgatagagtgatggaagtttagtaattctttgaaatataaaattacttaggattattgcttttaggccttttggctaagatcaagtgtaaaattatttaggattaataatctcatccctaagtggaagatggaggggctttaaggatgcacttccctaagttttaaagtactaaagctttagtgatgtttccaagggttaactccccaatgccagtgacaaacggatttcatttgccaacatcatttacttcttagcattactccatactagacagaataaatggaggccagagtgtaaccaatacgtctactcattcacttctgatgcccatctgggcatgttatccatcctaataaagaaaatttatcataatgcaacttaatgtgattatccttcaaatggctccttctgcctccagtgaacaacagccagcattttcaagttggaattctgcaaaactctcttctgattcctctttaaaatgcaattcacagcttgagctcacagagcctgccagtggctgaatggctgcactaggcggctgagagtccttcaattaagcagcaattttgcaattagtggaaacgaagtgcttcataacaattgtttgaaaacaagttgagacaagtgagcaattaccccattaaaaagagatactcactgtcacaggaccaaaagagccccctcacacaaacggaaaccgtccccacaaggagagaaacacaggctggtgttttaaccattagcaggagatcagtacactataactgctgcagcaggagtgtgtcttccataacagtcaaaggtttagctgccctcctcttgctgtgttctgttttcattcagaaaatccacaactgctctttgctctactccgggactaaattcctacaccttaaattcttaatgaactacttgtgtgtgacctttccttccatgtcgtgcatctcagattctcttggtgattagaagataacatctatagaacccaaatctgccaactgtgctacaatttacaacatatagggtatgtggagtgtggggaaagaaggggggaagggggagatggattttactaaaggcttcaaagatgaatctaaaaaagaataaaaacaagctggttgctatactatcaggtgggcgtgctcagcctgctccgtgtgccaagctacaacccagagctatttatattcggaagaaatgagattattgggactattaaaaagaattggactcttaaaacattacaggaagctgggaacagcttatattttaatggtgccccctttaaaagaaaatccaagactttgtgctaggattttagaaatttgcatttacatttaatatgatttctccctcccagcgagtcaagatgaactagaagtaacccagctccttttctctcttgggacctttaggagatttaagcaaccatggctgcagtttaggcaaatgatcactttctaggttcctcttgtatgcagttaaaagggtgcatactttcaaggcatcctaaaccagatttcctaaatgatttaatttctggatgcataaaggtttgcaatcctttcaaatgaccttaagtagcaccctaaaacaagcatgattccaaactacaaactaagctctgaatgggctgtgagagactctagaagtatgtgaaaaattactgttagtctgttttaaaaaatgttatgtctaagtgtgtctgcaatggtctaatgcttcaagatgtctacgtcatgcacaacagtcttgtttatctgggaattatttctttcttcctgaatcatttataaacaggaaaattttaatgacgtaaaacagttctctatacaacgtgtgttctgtgtcgttgtatttactattaatatttaccaatatttatcccatttttacaaaataacatagaagaggaacagaaaacaactttatgattctggaattccaataatggtaactaccatatttcaaattccagtagagattacgtttcaacaagtctctctctctctctctctctctctctctctctctctctctctctctctctcttgccttggggaggaggggaggaagaacaaaccaaaacctccaaaccttatgaaaaatcagtgaactgcagtaattatttttaaagctccctaatgttatttcatcctctgcgcctgactaagcctattgtgtgtaacagcttgaaccgctcttgttctaacctcagatacctccgacctgaaaatagtgtctcaaacttacaggggcccggatgcttagaggaatcaaacccgtaaataaaataaataaataaataatgcaacaagacaaaacaaaaatcaatcgaaggatcaaaatggcttttgaccttataactaatgtataaaagaatcgatttttggagaagaattaaaagaggggtatatttttcagtaagttgatccaattgttgggaagggggagtcatttagcctttcatatacaattagataacaattactgttcctaattatacatcgctttctttttaaaaaaaggataagttctagaaggattaataaacaggcagaaacatacttccagacaagaacatcctgtattcttgtgagaggggctaaaaggctgttgttgacgctgagaagacggatattttaggatgccgggaagaccctcaagtaagatcaagaaaatcctagcacttagtcaatggtatctcaaagcaccccggcaactcaaggaaagaaatgcaacaagccaaaattccgaaccgagccgcacatcttcaggaagctgtttcaaaacgccactcaacaagtttctactcgcaacccccataacgaccagcaaaactgcccctaaaacacttccccgcccccattcgacgagccccagcagctactcttgccagtgtggccagaagagggcaccctctaccttcctagctcagctctcctggccctcccctccctcctccttggatcctccctctctccctccggctccccccatccccaagtccccatccccagtttcctagcccaggctccacccccaactcacgaattgttttcactaaaacaccagttcaaactcaaactcacagcctgtggctcaccgccctcagcagccccggggggaacaacaccaccccccccccacccccggcagcaatttccccttcttccttgtcatcaagcacaaagcccccatcttcagctatttctttctacgcttaggtcgcttatccattgctcttcctgtttcagcatccctggaaatcaaaactagcctcttcatcctccataaacacccaacctactcccggatgaaagtcaaaactttcacttcctcaggaggatgcccaaagggaggtgcgcaggatggacagagggtcggatacaggctgtcctggagttccgcagaccctttcaggccccagcgataagaagggtcccaagttttcctagttaaacgttgaccttggacctgtaagtaagctttggtagtactccctagagagcaggtgacagtgaacagcctgttgtgatacccaggaaaagagatgaggacagaaggcgccaagacccattctcggactacacaccaccccggtccaaatttgcgtggagagtgcctaagccggtggtaagggctctcatcccagccctgtcccggtgccatccgtctgagcccccaacagctgtcgctctatatctctctcaccacccttcctcgtctgcgggaggacttcggggatccccgggacgcaggcttagctcccatggcgcaagtcgtcctcttcccttggctttttctctcacactgaagggattcctggggtcgcactgtccctcagagtcgtgggatcccgggagaacgctccccaggagcaagcccgcccctccgctgtcccgggacgaaggtgaagccggagttctgcagtcccacaacttctcagtcccctagccaactttcccgggcgcacgcgcctctggctctcgcacttagccccacgccccgcagtcgcctacctcagggtccacacaaagctctcggatccccggcagtggagtcacattgttgtcacgcttctggtccctgcgccctgccctgggccccgtgcgctttctcgtctgccccaaggcagtggtggcagttgaaggaaccgggtctcatcaaagcctcccaggcggaggtggcgcgccgccccaggcggtttccttctccaagcccgggagtcccgggcgcactgggaaccgtgcgacagccagccagcgggtgcgccccggcacggcagcagcgacgggcacccagagctcagccagagccaggcactggggtcagacattatttagctcttcggttgagcttcgattggtcagacagcgccgcccctatcccctccctgctccgccgcgccaccgatacccattggggtggctgcttaaaggggacgacgcgccttttccttgcgggggctcagccctcggaagccctcggaagccctcggaagccctcggggtatccctgatcgccttgcactggcttctctccatttccccggagctcgctgcttaaacccaaagctctgtgcctgccctctgcggtctccgcagggtgccctttgctaggaggggtggtcgaatcccggttcctaggcaccctactccccgcaatgtgctctagagtaggaggaagcgagtgtgagtctcacacgttcaaatctttctcccctggtttgcaactctccccatcttttccatcccagcacccaagttctgtgggagagggcgtgcatccacccccacccccaggccccggccccagacacaccttcccgcaccttcccgcaccacaaagctagaaaaagcgaacacacaatgaaactacacagagtgtgcggggttatggtttactccgctaccttaaacacatcggcttaaccagagtttgcgccctgacctctccggagtgtgcctaatagaattcaatcaagataataacagtattttttattaatgaataaccccggatagcattacaccaagttactgcttctagccgggaagcctaggcaataacagacctcactaaagccatatgcttcccagcagaccaaacgggggcgggggggggggtgaggaaagagaaagaaaagaaacccacctttttcagtcactacttgtcaaagtaaacatcaaggcagctgctctggggaagaccggtccccaaggttctagactcttactatatatttccccttctcttcagttaaaagggggagggggcgagtctttggtggccgatatgtactcctgttctgcagcaaagaagttaaattattgatagtggaaattgcatggcggaggtaatactcgcacgccttcagcgagaagctccatttgatctaggcagaggctgggagatttcatgctagctcgccgggggtgggtggggggagcggcagcgagagcagtcctctcctcggtgaatgggaaagtgggtgggagtccacgagagggctccacgctgccttgacgtgagctgtcatatgatacctcctctgcctcgaaatagacactctagtgcacgaattaccagaatcagaattccgcgcatttaaaatgatacatcttttattagaagaattccgttccagggcattgcatgctttgtagatgttttcacttccagtcctagcaaattcacgcacacagaagccaagcctgtcattatctaggcagcaacaacacatcaatatatatatgtatatatacttaaccaggatttagggtgaggggtgggtagctcactaagcccccttcctctagagcagagagtggtctttggaccgtttttgtttggttgtttgattttttttttaacctatgagagatcagttacatgactaggttctggagggctactttcatttagctgtatgataaactctgccaagtgtctacctggattgctgctttgttaaacgttgcccctctaatccagccaataagtaaaggctagggcagacagacctttattattcattttattttatttttttttagaaaaaaatataaaagaacaagagggcagtattgagcacggtgccacagcctcttgttaacataatcacctgtctgaggattaaaagagaggctccttcttctaaggctggcctttagtatgtctgagacagggcccagtgattagcactgtaataagcaattcattcacagacgatttcaagtcaccgtgaaaaattggcatatgtgactcagaaaggaggcaaaaatgggtatccgagactcttgcaccccaacttctgtgaccccttgtatgtgaatgcttgtgaaatctgaatgacttaatcgttgttaaggcattgctgtatgactgtatctgaatgcttaaacattaaatttcctagaggaaaggaggttcataacagttctttttcccagatgtctgttgtcaccagagtgggctattgtactgaatatatggcggtagtgtatactgagattcatttaccaagggctgatggttaacaaagtgaaattactaatatttgctatttgaaagcttccaaaacctgctgacagaaatctttctgttttataagtgaagaaccagagattcaataccttatagtaattcaaccaagaataccagagatccacccttaaagacctcaaaagctcaagcgagaaaggcctcctccttctaccctttgtccttcagtaaagggaaatcatcagaactcaagctactttagagtccccttacaaattgttgctctggatagtcaggctattcaaatatatgcacactctcagagtgtcactcacagttcgctttgccccactgacaacttggtggagcatgtgatcaaaacaaaggatcttacaacacagatgatagagggcatgaagctaggcttgggccaccttaaagaccctctgtttcttcctaggttataggctgaatataaccatgatttcttctatcatcataacttaagtgactatattacaatctttaaagctactggtatatctttaaaaaggactggaggagtcctacctgcaattttaaaaggtaaataattttaaatcagcttcaaacaaatgtctactttccaactttacatttgttaggaatgggttttgcccccagggttttgtaacctgttaaaatttacttcttttccaaaaactctgttgcaagcaaatgtctttgctagcacctgtgttgctgctcaggtagatattatgtcagatctctatactatggaacttacattaccctgttagcacttcctcagggtggaaccatgctttcaccctgagactctgattggatggctgatcctgttagtctcactctcctttgacaccatagacataaatgcttgtgtcttccttttccagtgggtggtgcattttcactgagaaaaagaaggagccagaaaggcaggagtatttggggatagaagatcaagtaccaattcagataaacctgagcaagtagacttcttcttcccacttttgagtatttaaagctttctgatttgtgattgtggtaatactcaaacagtaagagactagacttgtgacatttacctatttgccataaaaatttcccctccctttcactgaagaacatcagagccaagatggatcaatggcctgtgcattataggaagttatgaattcttctgaaatgttttcattctgataacttattcaactagttttgggggcttaagatcaaatgttttttttaaaaaagatttttcttctctttgtttttgaccaggtgtcactatttagctcaaactcattttggacttggacttgtgagtatcttgtactgcaggtgcctgctagagcagtagattactgtcctattaagcataaaggcaaatcttgattaaatgaggcattatctttttttctaacagtttggtttctgacataaaagattgatattgggagcaaaaattccttctaagatttgatgccaatgttttctctaccactaaaaaggaagaaaaaaactatggagaaaagaaatgtcattactgcggagattaaaagttaattttgagtgagtctaattcttagttcctttggtttattgcctaatattctcccaactcaatgtttcaaggggacaaaagtgaggcataaatgtgacttcccatctcttcttgtcaggaaatacaaactaatcctcattacccaagtgggaacagaggcagtaggatcagatttgatactgacatattattctattaataattttaattggatgaggtcaatcctactatgtctataagcattttatgtttaattgtgtttattgaagtttcttggttactcctgccttcactcttctttggggaaaaaaaaaaggtttggtatcaaatgaattgaccccaaacactgcttgaaaactagagaaagtaattaacatggggaaatagtaagtaaacagaaaacttccccgatgagcagagtgacaaggatgttttcaaatccatgctgcatgatttccaaggtctagtttggccttgaactgtgtcattcacaagcctttgcaatcattaaataaggtctgttcttgagaaaaataccttaagggaaaaatagtttccgtattcattgggtagtacttctctgtaagattcctataggccataaaaataactccatgctatacttagatgtggccaaattggccaacacatgttacaggaattctatatcctgacaggcccagtatggacagataaaagcaaggaagcacaaaaggcctgggcactgagagttgaaaaggaggacctgaaaaacgatgatcccatctggaaatacttctctgcttcagggaaagtaccataaaaatcattatgaaattgctgaggctaaccccctaaatattcaagaatcacctattggtaagccttcctctaagttaccagatcttccctgaaaacatggaaagattaacaatgaaagagccattgatttactcattaaactggatatgagcatagtcaccaagggcatggaactgtggacttgggacctcagagctagacttactaaccatggtgtgtcttggttgtactgggagtagagccatggaaagcatgaactaacttaaagtactgggtttcaggacattgagtcagatatcaagagtaagtcaccttaattttgaaatacaaccatgttttaatgtgtgatagtcgaagctagatttttcctgttgtcaaactttacatttttttccccatggacaaatgaagaaagaaaagcatgaagtaattgtggtgcttctcaaagtcatattaggaagtgcaccaagaatctgggctattttccctgggattttgatatgtgtgcctttgaaaaatgaactgtgtgatgaaagacctgggtaggttatgcagctctcttgacctggtcctgcctaggcatatgacaaaaggggagggagaggcctccacagcacatgcaagcagctctgtctagcacatatcatcatctggaatcatccaaaaatcatcaccccatcaatttcagtttccctttacttcacaattaaattcattcaactggctataacttgctggacatcagcatgtgccagccattctatctgctatggcacagataaacaaaacacatctccaagctttaggagtttatagtcttggcgatgagttatagtgtagttcaagagccattacttatttgccaaaggagagaacttatattgttttgttttgccttaggtttgttttactatataggctgataaccatctgtctgccccgtgtagtaatggtgagaagaaacttccctctgaggcttcagggataaataagagttagggcgggcaccccacagttaactattgccctggttcttgttattcatgcttaactgtgttttcataaggcaagcaaataagagtagagagaggttgagaagatacggggcaagtgatctttatcagcggcatcttattttgacatatgagtaggtaaactcttttattctgtttatgtgtatgtatgtgtatctgcatgagcttatgtacaagccatgtgtgcaggtatctctggaactggagttttaggtagtcatgaactgcttggtatgggtgctaggaaccaaacctaagtcatctgcaagatcagtatgtgctcctaactgcagagccatcactccagctcctaggtagagttttttgttgttgtgaaaaatagatctggaaatggtgtgtgtatatgtatatctgtgttgtgtgtacctgagcatgtgcaagcacacatgtttgtgtgttttgaaggtataaacacacacacacacacacacacacacatatatatgaatgtggaggtgggtgttgttactcaggaatctatcctgttgaaagtgccaaataccttggttgtttagacaaagggtctctcattggcctggaggtcactgtctagctaggctgcctagacagcaaataccagggatctggttgtctgaacctctagtagctaccacatgtggtattttaagtgagttttagaggtcaaagtcaggccttcttactttggggcaaattctttacagactgagcccctaggagggctgttatggggttatcctgtcttcctacatagcagattaaacctcctttgcaggacttctagaatctagcattgctagctcttggaagttccttcttggagcatgttttcattgttacaattagtatcttgtttcatttcatccagccttactgaagatgaaggacagctgcttattaactttctgatgttgctaaattgcctctcagaccgttttcatagcatatcgaacctcataaccttcttcataaactccaacttccaatccattcatcacttctattgctctactctggacttcctccaaagtctccatattcttctgaaaacgtgaagtcctacactcaacatgtgtgggaaattagccaggacttagaaaacactggaattgtgagttatctgaacacagctgttggggaaaactaagggagaagaagattcaatcagattgacaaatcatcccctggaagttggagacaggagaggttgtttttataaaagaacaagcttttgaatcaaagctgaatctttgtccttagcataaacgtgctgcatttttttaaaagaaacagatcctgaacaaggtattcattccctgaccccaaatccaatgacaaacaatactgtctaagactaaatgatgttcactacactacttgatatctcaagctgtggacttttaactaaactggaatactattttcagatcctcaggggtgactacttttgtacaagctctaagaagaataaggtttatgaaatactacactacttttgaggcttttacttcctgaaaaccattgtaggttttggatttctgtcttgttaatacctaaaacctaattagaataaagttaataaaacaagtccaatcacataaaacccacactaaccagcctgatacctagagatcaaactttcctggatgtttcatccatcaggtatacttcatcaggtagttcatgacttcacagtccgtaccgcatgtacaataaattcagcatccttccttactcaaatcagggtagaagtggaataaggtctttccatagacaccagtagctttagttcctcatgtgactttagcatctctgaaaagaccacttgtgctaagatttatctacatgccttcaatcaattatttaaaatcacatcgtctctgtaagctgctttctaggagaagggtggatgaaatttatcaagaatacatccaagtagatggatgacttcttgtcttctgctgtcttcctactcagctacccttctagagctggtgttttcccttctgaggtgctgcagagacacagaggacccagataccattcctggcatgctcccaaatgaaatgtatttccagagaggtttcaagtttggagtggagcccttagaggaagaacactgaattgcacaaggaaagccaataaacatcttagtccctagcaggaactatgaggctgcaattacgtttcaggctgtgctggtccattttcttcttctccatatctgtaaacaatatgttagattttggaggtttgtcatagactgtgtgttttggagagagtgttctccatcagagcatctgtagtaccacagccagtaacagttaggaaaggcaaacttatgaaatggcttctaaacacagtaaatcccaatctaaacaatttataacgtttcttactcaataactcttagaagtcagctcatgcggaactgttctaaacaagttaagaaagaagtaagaaatcctccattgggcaataaaccgaagtgagtacaagagtgtgcaggtaacgagcctcagaattcagtggggttagatatttatttctggaaaattctgtacggatagtgtctgagacatgacaacaattataacaactaaaattgtataagaattttcaggtgagattaataattacaagaaaactttggcattagaaagacacaggttaaagcccagctttgccacagtggctgagccaatttagcacaattgtctgtctaaaggattaatcaggttccttatgttaagctatgaacactgacaggctttgcctagagagattgtcatggaaaggattcattgaggtgcagtaatttggaatgctcactgtattaaatgagacaaaatcaggtttcactattctttcatttgatcctaacacgctggttaagtgttgccatgctccgttctatgattgtgaaaatgagactctaaaatgagaagtaaccacttgaaagccattggctgatcagcaaatcaaaaaaaaaatcatcctaaattagtgtttgtggccactgattttgaggctctcacctatttcgaagagatgtagtgagaacttcttaggagaatacatgtgcaaaccatctgtaaatgaaatgaaggcgtgtgtaacactcattacacaggaatacttggcttcccttcctcccactgtccttcctgcctccagaaacagtgggattacagacctgtgccatcaggctaggcttagaaccagggttttaaaatgagcttgtaagtcaaaaaactttaggtctgaagttcaacttttccacttaaaatttactgtgtttgtttgggcaaattacttaaactccccaagctctagtttccttgtttatataattagaatataatctgtctccaagagttactttgagggttaaataatatatatcaaaggcaaagcaaagagcttagtacatggtcaatgtaagacagatgttccctcacctcacaatttctgtcaatgttcctacagtgtaacaatgacaatatctaagagttttcagacagttgagtttgttaaagattgttagctttctgagggtaatattacctaagttaatagcccgagcttaaaattccaagatctgctttgcaggggtggccatgttgcagatcaaaccccaagacttgatgcatgctaatcaagcactctaccactaagctataccctacccatgcccctggaacttcctatccttttcacaggaggactagatttctagagccatggaattgtgctgctgctgatactaaaattatgcattagggtcatatggagctcaattgaagcacatattccacaccatggctatcttgtcaattggccttttacacactgtgtagcttttctaatggtaaaactgatttaatttttttctgccaatgccaatttcctttgccagaaaggaaaaccaaatggctaatgttgacattggctaaattcacatttctgaatcaatgctatgttaataatttcctcccacatgttctgttgtcaaatgtgtagtggatcttacccagtagtatttgcagactttattacaagcagaagctagacatttttgtattgtatgccaatggttagttatttcaaaattatagcaatcattttgctgctagattatccaatatataaaagtgcatatatttttatatcacaatatattacattttatattattatagctatatgtaatgcaattgttttcctttgtaaccataaactttttattatcttcatttagaagtagtattctgaaacgagtttacaaaatggttcatcagactgccaagagtctatgccacaaaaatggctacaaatcccatgttagttcaacatgtcataaagaataagagcttaattctttaatattgattatggaagtcattggagaggaagaggttctcagaggaggatgaaagtgagagtcaaggaaatcatggttttctactaaagtaattagaactatcgagcatggaaggcagagatcatggccagggagaaatggcctggagaaacacccacagagagctcctgtacaatcccgattcttttctgcttccctgattatttctatattgctatacatttcctctctcttttgcattcatctctccagccatgctttaccctattggcttcctgcttaggtgaacactcatgagaacacttaattgggatatttcagtttacagagctcttaatacttagagactgtacatattcaatatatttctgtgaacctgaagagatctctgtcttaacttcccttggcactgatatagtctctgatggggtttctaggtatcacagcacttgatacatagtctggcactaagatcccaatgtttttcttctgctgttgggctctgcttcctagtttggaaagggtatatgcattcactcagaggttaaaaatattggaaaggtcatttctattttccatagtaatccagagaaatggccttttcagtttaaaagatctcatataagacacatttttctaccagcttcaggttgaactgttaaatttggaattacaaattgctaaatggcttgcttgaagaaaatttccctaaggtttattctttttttaaaaagtttatactttgaaatgtattttgccatttgcctaaaatagaattcaagagtgatgtctgtcatccttagtgcatcagaagttattttaaatatggcatctttataaaagtcaatagctgcctcatcaaagggcaatcatgtccagtgtgggtggctgtgccaattgtttttgaactactgcagcaatccagccaatcgcagggaatggcttgcagtctctcgacacccacatttcttcttaattatctccacgaggctgagttagctaaggacagatctatagcatttcctggatgtccaaatgcccacacaccttctgcaggctttgagttaccagttctctttcatgtttctcctggctagaccatctaattatctattagcatgtacatataatgcattatttataagaacaagacactttcaggatgcaatatctttaattttaaaaagaaatgacataaaacatagaacatgtatgtcacaaagaaaagtgccctcaaatttgacagtgggaattctaccacatccttcctttaaaataaatctaaacaaatataaggtcattcattgttcaatttaaactatcataatcatcatttttgagaaaaaatggtaaattccacatccagagacctcctatgtaggtcccaaatctgttgtctttaagttttatttaaatgtatttagaaagtaaaaaattagtgatttaaaattctaaatcatcaaaggttaggataagttaaactggatttcttgtgaagaaaggggaaatagttacagtgcacacaattctcctatagtgctcggtcatgacccatgggtctcacgcataccaccaaatgctctacctttcaactatccctgctatctttctactatttgttttgagacagagaaccattaaattgcacaaactgagtttaaattcattctgcaggctaggcaggccttgagcttgtgatcctcatacctcatccacctccaggttgtatattgtacactagtcaaccatgacactgaaatagactttagaacttatcctgagaacattgtttctgtactatgtgcatggaaacagaaactgagttgacgtttcagttattgataatgagttgaggataaagcttgaactatgtctttgaacccaagtcactgtgttttcttgaagaaagtacaaatccagatgtctttaaggggtcagattttgtcaccagcctataggttctggcaagataaggatcattcagtcttgctcatggctgaatcttcaaattctgacatagtttgggactcataattgattaatatttaatacatatggaataaaattatgactgttaattttctgcagaaatatgctgggagcaaatgccatcatagctcacttaagataggcaaacactatctaccaaggtaaacaagtatccaggaatccaaaaccaggatgaaattccagagggttgaaagagagcaagccagcatgaactcatgcatcggatatgggctggactaagtgacctctgacaaatgtctggccattagattctctgactcatgagtaaaagtaatgtacttcttggctttgacctatcttctgtgtttgtttttcaggggaattagtgactgtgacttagctagtgtgtcagccacaggaagattcctgttttctttgagcctccaactttgagagagggaaagaagaatttaggaaggcaaggtcatgggctgattaaaactttccattagttctgccaaatttggggagtatttgtagatcccttttttaaaaaattagataaatcaaaataggagaaaatgatgcctaaaataccctcagaggccttagataggtctgaggggcatggtgggcactgaacaagcacagtccttgaaactggaagagacagactccgagccttcagaccgtccactgtggtatgtctctgcagcttggcaccgaaattccctgtgtaagaggccatggtgatccccacccaacatagcccatctggaaatcaaatgaagaaacctgtaatgagttgtcaaaattctccatgaagtgttcttactagaaaatacaaataaactgtgcgcttgattatagagaactccttacaggattctttttacagtgttggaatggaagagaaaagagagggaggaaagatgggggtggggggagtcaggattggcaaaaaaccaaaccaaacccaaaccaacaaaacccccaaaaaccttaccaacgagaatggaggcaggataattcagtattttgacccaagtgtcaagttggggcaggggcgtcactgcttatagaacatgtctcctttttctagagatacttgtgaaaggaacagctctacattcccaactaaaagatgtaaggctttatggtcttgatattatgctcagtctgaagtcagaaggggagagaacattttattgtttaaaaatttaatcttctccacttaaggcaaccccctccactttcagagcactcagtaagtggtaaacgttcactgaatgctaatgtttattttattattaactactacacagtgttctttatagggattacagtatgtaattttaagagatttgctgcttgttaaactcccactagaaacacacacacacacacacacacacacacaatgcactgacagatcagcaaagaaagacactagcaaaagaaagataatttgagatacttctgaggtagcagttgtaaaattaaaataggcaactcattaaattatccatagagtgaaaagaaagctacaaaaatagatatttttctggcaagtcagtgctgttcagaacaaatatagttttcagtcagcagagtttttatatcagatgatatcagttcatatttgttaggatcacttgcatggttggactagtttgctctaattaaaagcaaaaaattacgtagaagaatttatttaggaagaaaaatcaacacttcaataagacatcattttaacttacagactgtaaacaatacaaccaaatgaatgctatctgagcaatttggaacatggtccccaagatcacagaactttttaaaaactaaataaataaaactccttttgtaagtcatattttagtttcaactgcctcaattcaattttctgactttcagtggctgcttatctgttttgtggtcacccaggctcttgtctctttctccctttgctggtgttgatacattgtttcttattaaagtttcccctagaggacaggccaggaaaaggaaagacctaaattcaccagctttttcttattaagaatttaaagacttggtaggggaagtgcaaatgaaagcagcggcttacacaggttgatcccacttcttttcaaagcttctctccaatttacactgatagataactgacaatatttagcaagccaattaatcgcttgcttaaaaaaaaacacaacaaccttcatttcctgccttgactgtacagatgagatgatctttttaattagcaaggactctggttcaatcaagtacaaatgctgcatgtaaaaaggatggtatactgatgaggcccatttctggagtggcagtttgcagagcctattcagatgttcttctctgtcctccaaaaattgctgtgttgtgggtcttaatgtcaaggatactgggaaagattctggcaagatgcacatcatattttcatctaattcagaacttatatatttcactgagggagatagaccaaggtaaaaatctcacctacagtgttaatatgcaagaccaggggctacaaaagtaggctagattactattaagattataaggttaaatgtctctctctctccctctcttcctccctttccatctcctatcatctttaatcttctgattccaaaaagggcagttgaaatacctttgcttttgcgttaaagagatctatgttaatacataaaaatagtgaatatcaggggcaccattcttaaagtgacagtggaaaccatctttccttacaagtcaaggatgcttgggtgtaagaggatgacgtgacacttttgaggcttatttaaattgttaaaaaaaatggaggttaaataattaggctggtaagtattttttctccttgtcgcccagacatgatacctataatttcctctgttcaactgtcagacaaattggcaagtggactaaaaacaatattcccttaacgaagcgttcgtctaaagccctagcaactgtattaggcagccccaagtattcacgagcaaggcatggcgcgggagggaaactctgcaatttagaatgacagatgattatttttttctctatccattaagctttctcaaaatgtcataatatttacacctattccttggtgaattagatccaaagacaggcagacagaaagaaagaaggaaggaaaaaaaaatccctccaactggttgccgctgggttggggaaaagcaggcgttgcacctttaaattttgtcccttggttctctgtccccggccccccttctcaggattttgcaataaatctcccagttctgcgttcagccctgcagatccgtatttaaaacagcaccatctgggaagggtgggtggcgatggtgatgcgggcgccttggagttcctttgcagcacgcttggaattgcatcagactgatccgaaatccccccgcccccaagccctgcccctcccgccacgcttccctcccggcccctcccctccgctcctttcgcgtagatctgactgagaaaacgcctggatcccggaactgtctgtgccccattcgctgcaggcttgatccgtaaaccctgccctacgctccctttgtgtggcgaacagcctatgggcagtcatctgatccaactgcctgtttttcattctttctccacccccctcacccccccaaatttccacaatatcctagcatcgtctatgaattcatcatttccacctgcgcagagttgggatgctttcgttcattaaaataatcttgagtcttgagttttggaaatctttccttttccccccaataacgcccctcacccgcatcccaagccttatccggggaggggtcccaaggcaccaagccttactccgaaagctgcggcagggcaaagctcctggcctgaacaaagggcggtggaagcggtgggaatggggggttgtaagagtgtggagaggtcttccccgccccccgcccgggggcacgcaagtccctgaactcccggaagagaggctggaggacagcgcagtggcacgctccgggcgcaccgagtcccctgggggcgcaggcgggggcaggggagttggaggaaaagactgggcggctcccagccggagtctagcttatctccaatccctccatcttcactccctgctaggctaccaggccacccaggtagtggcggcagctcggcggggagcccgggccctccacccgcgtcagtggacacaacctcgcttggctgggcggtctgcgcgccccgctgattggtggctcggtcctgccgccgcacggagctaggagtgttcttctccacctccacaaaccacccaggccccctccccgggccgttcccgggctcttcgatctagaaaggaccttccactccggagcggagcacccccctcctccctgagttaccccgcctgactcggacctgggctcaatgaagcatccggcccggcagggagtggagcgcagtctcagcggccccccttcccttgagaagcaggagccctccaagccagcacccggaactctcggggagggatgatagaaaggggtaaaaaaaaaaaatcacccaaacataaagaactatccatcgaggatcgtgagggcgatggagaggtagagagaaaatgagggagggatggaagcaggaggagggggcggggtggaaaaggggggcgggaaggaggtagggaggggggaaagagagggaggcagggataccgagagaatgaatcctcctcactagaggagctgaaattaccttgattcatttttgtgggtatttagctaacctccgtccctctcccagcttccacctcctctttccccactgcacattccctccatcctcttgttctaaatggtacaaagtcaaatcttaggaaatcgaatgttgtgtaaaaagcttcataattagtaatgaatctactgtacacgcacacacaccacacacaagcaaaaagaacggaaaagagggagggaaagggggaatgagagaaatcttacatttgaatcagatatttgcagttccaagttaactaaactcattatatccgcaggaagattgagcttcctccacctcgatttgccccaggttctcacctaggtcaatttaaactagccaaataccaagaaacaaccatttctcatgctctctctccacttcctcctctccactacgcgtcctttccggaagatcgagtatcaaaatagctcaagaattggggatgcagggtccccgccccggtgcttaccttctttgcggcttacaccaccccggtggctagatcctggtgataaacacttgcatttcccaaagttaacccagtataccaacccggagcttgccaagagtctattccagcctacaccgctaggaagccaacttcagcgagctcaatgaggggaccaaactggggctcgctctccaaacgctccgctccaaaatctgactctctctccagccccgatctcggtgtgagccgaacctcggaaaagacgctttttaagggcgacaccgggttggcttgacagcgaggaaaagaatacctggatgaagtactaccacctcggacaaatccgctggctctgtccaaggtgctgaatggactctgctctccgggatcacacacccggcgcaggaggaggaaaaggttaaaaaaatattctctaattaagtggtacttgatattgctctagacggtttcttccacttccttacgttttgtcacgtgtggatggctttgccaaagccatcctgttaatagttgatcacatgttgatgagaccctttccacgtatgcgagcattacccatttcattatagatagacacttctgacttattcctctcgcccccaactccaccactatcctcacctaaactcttagtctctaacccactcttaccctctccaccccagccccaaactaataacattattgtttttagattgaaattaacccccttgcggatgtcaattatatgcccacatataaatcatacaatatgctcacacaccatacagtaaagcaaaggatggaatacaagacggttgtcagacaagcatcagctttgaacagccagtataacaaccccctccagttccaagtttgttccacgcagttccccactgctgtgttaaatctcaaatgattccaattaaacttgcagtgggtaaacccgattcccctggcctgaatagctgctgttctttggcgtgtgaagtgctaggaagagccatgatatgcctgttgttaggcaacatgtcaagatttttcaattataatgcacggtttattgctactcaccattgtggctttgctgtcctggagactcagtgtcttaaaatcttgtctccccaacagatgcaggaaggtaatgtgtcttgtttgaagtcatcatgtgagaagttcggctttgctcagtggatcgcccaccacttggtgtgacttatgaatctaataacccttcgcaatatccgcaaagcttcaactctcatccaccttggcgactacagaagacaaagcaactggcatcgatgttgaaaaacctatagatttacgcaaacgccctcattctgagagacacgtttccctttgagttcttacgtgattctaatgaatgagcgaggttaccaatgactgtccaattgccctgctatatagcgggcgtttcctgaagcagctttctcaacgcctgtcactgagccctagcacaaaaagttcccagagaaagtgagggagtttcagagtacccccataaaaataatccaatttgcacgccgatcctttgcccactgctcaggtcacacctggggctctggcaaagatgagctcggctcaggagatttccctgtcgccaggtaagaaacccttcgccttgtcaagctagggcgggaagaccgctggggaacttgttgcttttctgcaccagccggctactgctttaataagaataccagaaaagcgcagcggggagggggcgaggggagggggccagggcagcctctctgagccagttacgtgaccaactcactgtgactcccttggtaaaaaggaaacttcttagaaaagttcgtgcccctcccccaccatgactaagggtctccagcggacgtggtcgtgagtgatgatcaaatgggagggggggggggggctgggtgatggagcgggagtgacttgttctagggaacaactgcgtgaatcgaagagcgcatcagccccacaactttcccttttcctcttagggactgatgactaggcgagaggcacccgggcgagccactagttgcccacaggaacctgtgcaagccaagctctcaagcggcttgagttgaatgaagttatgactgcgtttgctctaatggcttatggcttctcaaatgagagttaacagcctctgtgcgcggctaggtccgccctggagctctgagcgaaaaggtgtaggctaggaggggaagatcggcgctagtctcccagctccgcgtcggctccggctccgtgcttcctccccagagtcgctgccctattttgggtgcttcccggggttgagaactgaagccgcaagctccaggaggtgggcttcgggcgggggggctctcccaggaagcctcgcgctggccactacacttcccactagtgactgcgcaggctgggaagtggagaggtcacgtgttggaggaaagtaagttggaaggaaagagatgaacttcaagaagagtcacaataaaataaacctcctccccccgtatgtgtgtgcgcgtgtgcgcgggcgtgtaaaaataatctcttgaaaggcggatgcggtgggggaggggtgcagtgggggaagggcaaggcccttaggctgagatcctaggcagatgtccggaaatctctagaaatgagctgtaagtccagagttaaccatatcccccaacatagggaggcgctagctccaggtatctcttcactagagtcttcctttgcctaccctcagcttagcttacgcagcgaagcagaggagccgagaatgaatgtaatgtaaaccagttgttatggagatacccgcagctcggatgagtgcgagtgccctgggaagtccccggacgctgcttttcaggtttccccggtttggtgccgacaccatgattttgctcttcctctggagttcccaccaatggaccccaccaaaggcatcactggccctggctgtggcgctattgactgcagggatgaggcagggagatgttgcggaagatggtggatagctctgaagttttggaccacccagtcctttaaaatttctgtttctttaatcaaatcaaatgtgctgtgtttgaagggaattcgtagttcttggtgtataaaatcagagttatacataggatgagtttgaagaacattagcatgcagtggctgcttcaaggttcaggtcccctccccctcctatcctaagaatgcttctttaaagaaacctaagcgttacttccttaatgccttctgtgaagttctgttcttggactctccattggtactagattattagtattagcagtaaatccagtgttgcgcattcatatgcacccctaaagagatgttttcaaagtcaacccagatcattctaggctccagccaacatatatttgtacaaaggctttctttacctcttagaggctcttggtgacctggtgtgcatcatcacttagagaataccatccaccagttacagtcaccaaggcaacagttacctccagctaaaaacaaaaaacaaaaatcaaataaaaaagaaacaacactgttcatattgttcataaattgtcactttttgtccatccatgaattagccagcagatgctgccctaagactaagacagctggcataagccatcttcagaggtcttggggtacaggttatgtgagaaaagccagtttcctgagaatgcaattcatcatgctgttagtaagttctcttgcctgttgatgaattcagactggtctgaaatcgtaaaatgacgtgggaggatggtctgtatgcgaatacacttatttctcattgacattttaatgactttgtcaacagtttctggccattatagggtatagccttctctaacagatatttattctaaaaattaatgttatgttttacgggcacactaaattgatggcttaggtatttctagattcaaaatatgaatgagtgattagatttaaaatatttagacagcacaggattgtactgaaagtatttccaaaggaatattttttttctgccctccttgcttggagctattattaaaaagccatacaacttatggaccaagatgaataatgagaatcgctatttaatgagatttactgtagtgggttgtggggaagagtgaggagatggcatttgacctacatcaatctgtgatatatatgtgtaatgaccacacatgtgtatattttcctttcttgatttctccctgacctgaaggagaattctgttctcctggttcattatcagctttccaggtttttatctgctcaaattcacttatgtaattcctttttgttttctgtctgtagaaatctagtacctaatacaagctaaggctacagtcattttatttgttaaaatagatgtcaaccagtgtacctgctacaattttaatcttgggaacacttgttcccaaggccatgccacttttttccctcacacaactctagtcagctgtgatatgaatatcacacttctccaatttagctgaccccattcatttaagcaatgataggaccatttcaaagtgaatgctaaaaaatatgtcttaagtatcacaactcaaaaatgcatccaaacttaaatcaaaatataggaacataacctaacagaggaaggatttttgctttgtttgtgttcacatggtattctatcaatgccacagttaaaaagcttgtcttctgtctgtctgttgctttataaagataagcacaaaattgaataagagcccatcaaaatagatggtacaagaacacatttgatgtttgaagcatctcagaagtagtgggaaggggtaatagaagtcagaattagaaagaaatattttccttagcaaattaagagatggttgggtatcttttgaaatagcatactcttagtttttaaatggaaatttacaacatcatattcaaactgatgagctgggaactctgctaacacgttgaggtggatgagatagtactcaagtgtatgcccaagtgttttcaccaaatcactctgttgttgatgagttctccatctcatccagtgtttgatgttttattttctcctttctctcttactactactttaaatccttcctcttgctctcattctgccccaggtagagtgataagggctaatgaactatagattaataattccttaaagcatccttgaatttcagagttgagcacttggttaattaatgtaagatatttccttccctcagtgttttcttctcttattcatcacctcaagattgctagttacaatccatgcaggaaagtggccactgagaagcttcagatggtagcaaagttactgacttggagcctaagaaaacaggtaataataaaaaaattctgtttatgacataagaagtgattctgtccaggtaggaagaaagatttggtctcttagtcacttcctgattcctaatggttctccacaggcaatagaaggagaggcagagaatcacgatgcacaatttggaaagctttctgaaaacaagaatgggtaatgattgccaagaacctggtgttgagctcatatttaaaaagagctcacgaaatcttccatctaacaaacctagtttagctggaaagaaaacaatcagagcatcaaaaaagacagagagacagaaagcttttggaaactcacgatttagtctgcaagagctcatctgcaagatgcattcctcagtgtgacaactaagcttgagctagaagatttggatatgacctaactcagtttcagaaaaccagacagcctcacaatgaagctgaagcaagaccccatggagtatggaactagagctgagtggatctcttaaaactgtcttacaggcaaagatgaatcaaaggcagtaagaagggatggatgggcatagttaacattatggaaaggcaaatgaaaaccagtgaggagaacatagtaagcgcaatgtggtaggcctagcgagagacactcaagatctctctgcctgcagtatctggagggaagatttcacagctgctgaactgcatttctcataatttaatagacacgatttccttggcggcttgttagaaagcagattccaagtctgggatacgaatcaagatctggcattttcaacaaatttccaggtgacagggttgcattgttttgcacagctgagtgctaaagcgtgttcttccaggcaatggattcactcacacgatggtgtgattgacagctaagaaatctctcgagtaactggagtgaatgtcatacagtttaaaaaaaatcaagggaaaaaaaacagttttaaaattgtaatgctgtataaaccacaggctctaacctctttctgaatttattaattctagaattgtgttgattgtaatgaacaccagtgttttataataaatagcattagcttagaatatgaatatttgtcatttaacatggaatgaaataaaagaagaattatctgctccatttgagatacactgagtaaattgcagaatggaagagaagtcagaaaaaaaaaactattctagtcatggaaagggaattggttaggtcatatgatgagtcctgagctcattctgggtttcttactataaatagggtattttggaactagagaaagcatagcagaaggaactagaatgacagagggatttggggaatttgctgaaaggttaaagaaactaggtctgtttttctttgaaaggagaggagacatagtgcagcattgaggtgtttgttgccatcctgaaaaacgtagaaggaatgggctgagacaagagtgccccggagctcttgactctagctgcatatgcatcaaaagatggcctagtcggccatcactggaaagagaggcccattggacacgcaaactttatatgccccagtacaggggaacgccagggccataaaaggggagtgggtgggtaggggagagggggtgggtggctatgggggacttttgatatagcattgcaaatgtaaatgagcgaaatccctaataaaaaatggaaaaaaaaaaaaaaagaaaatccaaaagttaaaaaaaaaaaaaaagtaaaaaaaaaaaaaaaaaaaaaaaaaaaagagtgctttacggacgcaagggtagaatgatcctggcaaggaatgaagaccagagaacggccattgcctttcctcagggcctcagcaagtagggttcctgttggcaaagctcctctgctcatagatcaggaaataagggaaagacagagaatgaggaagtatctccttgttgattgaggaaaatttcaaatggccatttataaattcgatggaaaccctaactccagcatatggtgtactttatcagcgttccccaggctcaagagctctgttattgtaacacaccacttttctgcctcatccaaaaatggaacttatttctcttcagttcagcaaataaatgtgaatagtttcagcgtacagtgtgctttctttaagtgactttttcatccacatgaatcctggaatacagtctccttttcacctgataggaaagtattgttagtgtttttatatatgcagtcccagcattgatattctatatgtaaagttcaaagacagtaagactttcgggtaactctggctgactccatcattttatattagggaaacacagagtttattgaattgaccaccactcagtgcttgtctgtatggtactgaatatgtatcgatgctagagacttaaatttacccagggagctctctggaaatgtcagacatgccaggcgttatcaaaggactctagtcttctgtcaaaattcatttcagctttatatgtttttaacaggaaaatccccaaaagacctttgctttgggtggtcttggattgatgtgggtgaccaggaattcaggaagtaggtgggaggaagaggcagctttcccaaatgtctccctgaaaataaatatctggtggtcatgtctgtaactgccttaccccaacacagataatgcatgaccatgaatactcactctcacagagcctgctttcctatgcttctgaataagaatcagcctgaccggcggttcctcagaaaattggacatagtactaccggaggatcccgcaatacctctcctgggcatatatccagaagatgccccaactggtaagaaggacacatgctccactatgttcatagcagccttatttataatagccagaagctggaaagaacccagatgcccctcaacagaggaatggatacagaaaatgtggtacatctacacaatggagtactactcagctattaaaaagaatgaatttatgaaattcctagccaaatggatggacctggagggcatcatcctgagtgaggtaacacattcacaaaggaactcacacaatatgtactcactgataagtggatattagcccaaaacctaggatacccaagatatacaatttcctaaacacatgaaactcaagaaaaatgaagactgaagtgtggacactatgcccctccttataagtgggaacaaaacacccttggaaggagttacagagacaaagtttggagctgagatgaaaggatggtccatgtagagacttccatatccagggatccaccccataatcagcatccaaacgctgacaccattgcatacactagcaagattttatcgaaaggacccagatgtagctgtctcttgtgagactatgccggggcctagcaaacacagaagtggatgctcacagtcagctaatggatggatcacagggctcccaatggaggagctagagaaagtagccaaggagctaaagggatctgcaaccctataggtggaacaacattatgaactaaccagtaccccggagctcttgactctagctacatatgtatcaaaagatggcctagtcggccatcactggaaagagaggcccattggacacgcaaactttatatgccccagtacaggggaacgccagggccaaaaagggggagtgggtgggtaggggattgggggtgggtgggtatgggggacttttggtatagcattggaaatgtaaatgagctaaatacctaataaaaaatggaaaaaaaaaaagaaaaaaaaaaaagaatcagcctgaccaatggaacaggaataaaatattctaggagaaaaaaaaaaaaactagctggtgtgaaactcccagggtcctatgttaatttgttaataaaaaaaactagtactttaaagaaaatgcccacttgttactcagattttttatgagttatgggttctgaatcagctttatctcaccagtcctggatgtgagagaagaatggtgtcttctgaagatgctgaaatcaaggtttaaccaaggctgcaatcccctgtagaaatgactggctaccctgtgaaacctggcttaaaggattgtaggtttagagtgtaggtcccctatggtttctgggtggaaaataaccgaagcttagattgagagaaaggactatgtcctgagtgtcaatccaaaggaatgcagatagatggctcagcttgtaagagcacttagtgtttttccagaggatctgtgtttgattcccagcacccatgactcataaccatttgtaactttagttcccagagatttggttccctcttgtggcttctgctgacactaaacatgtacatgttgcacagtcatacatacaggcaaaacacttatttgagagagaaaaagggagatagaaagggtgaggagtgaaggagagagaggagggaagggagggaggagagggagagagaagggagagggagagaaagagaataagaatgaattaggaaggcagtctcaactaaagactgtctatatcagtgtggctgaggggcatgtctatgcactattgtcttaagttagtttatttgcgaggacccagttcacagtggatgacaccattccctagaaaggaggccttaaaccatatgagtggaaaaactggattaaagaaaaacaggtaaggatacatgcatttatttttctctgctcttggctttggatgtgaatgtgactagctgttagaagtttctgttttgagttcccaaaaccaaccaaggactcaacctggtatcgcaagccaatatcagttccaccaaggaagcaagtcagagaaaaagacagttctctccagtgtttccttagaaacgtctgacacatatgtgctttctgttgtcctaactacctctcttgccccagacaacatggaactgtgaatctttccttcaacatcttgtcttcctctgcttcttactggagggaaaattctggcaggaccaagtagatatttgaagaaatcatttatgaagtgaagaagaatgggggaaaatcatatttgcaaggttggtgaggattatgagagatcaaaagcctcaatcatttacttcttacagccctgttaggaggcataagaatggtggctattatgtattgggcactgatttgtgccaggttttttatttagttctttgtatatgtacttctgcttaaacatctttctaacaaaccatgaatcacatggttagcaactgataggataagaattaaaactccggattttcaattttcataatccataattttgaatggtatgcagcataaaacttttttgccacatcattctcttaatgcatatttgtttgttttgttgaaatttatttatgttgcaacatactatgtatatatactatatatatatactatactgcctcctcccctcctccaaccccatagtgatatataatacaagcttagtataattttactagatgacttagcataaaattgctccttttatctctgggaagacatgtattctaatctcatacagcatagaaatatgttggaatacaaggagagactggaaaaaaggcattgagccccagttgccctacatttccctagaggttaaacaacttcagctctcttcatcctagaaggtagcagatgtatcctagaagaaacctagatagtatattagccaatttctttccaagatgcaggttattcttgaaacccaaaagctgcaaatcaaagatggggtatacactgcaaattagggggcactaatgcgatgagtcagagtcccagaatgggtctaagtttgcaaattactgtggagatgttcccaaagtcttgatagatctatgttaagccataaacaaggacatcatattctccaatattactgtgattcagaatctaaatagtgacctgtactctagaaatgtcaaccaagaaagggaaatatggatagcccagagatctgggtgtgcaaagaaggccgtgaccttagtgtcttgtgatataggtggttgtaaagagcctgaaatttctaaagaatgggaggaattgccagtccctacaccaagcctgcttctgttttgtgctcctataagacacaggatataaatcttgggaaaactgtccaatgttttcttagtgggatgaatggaaaagagttcttgttctcactgctaaagtttgggttgtctaaccttggcaaacaccttttctctttgggcatcttttccaacttacctaacagcactagatctgacacttattgtgggctaaattattcatcttcttccttcttgcaggtttcatatatcaaagttctaatctgtagtgtctcagaatgtgaccaggtatagaacttggctgtaaaagagatttttcatttaagatgaggatgtagtgtggagttttgttcagtatgactgtcttctcataggaagaaagactttctgcttttgaaaccaccccaagaatgttctttattttggcaaatcaacaaactcagagttcaaagagccaaattatctgacttcctatccctgtagaaaaaataaaacaaaaccatcccattctgtagctttagtattgggatgaataatttgattgtagttggtgccttggagctaccacatggggaagctgtgagactttagggaactagggctactgaggtcccacctccagtttgccctgaggtgctagatctgtgagtaaagctgtcctgaatcctccagaccagagcaaccatcagttaccaaagtgatccctggcaatgccaccttaagagatttacctgaattctgaaccaatggatgtttcagatgtaagatggctgtctatgccaactattaacttttggagtctgtttaaataacaacgtaattttactgatttattgggtgcttatagttctttcaatcctgtataggttcattttcaccgttttacttcttcatctgccaagtcagaaagtaagctgctgatggttaagggtttggacatggtgctgagactgtaatctggtaagctagagacaggttgctggttttgcttaagacgagctacttgttatctccgagtctccatttcttcatcagaaaagtatgggtaatcataactgttatgtgaagctttgtgaggatttaatgcgttaattagataccagtttacaaggcagatagtgagtgttcaataaatgggagtcattactgtgcttgtaatataacagcacctgattatggtgatgaaatcaggtcaagctgtctctggctggcagcaatactggctgaggtgtctttaccagataacagctcttgttagacttcaaagagccaaggtctctccagtgggtccttctgagttgtggggttgggtttaaggattcaatatcttttacattcacagttacatttggcaacactaatgtatccaaatacattgcaagcaggaagcaatagaaaaaagcataagatttaatgaattttagaattaatttggttcaaatagctccagacagaaaagtaagtgtaggccgaagatgtagctttgcagttgaacatggatgatgagcctttgccctcagtgacatctctgaaacagaacctgagattttgagtggaaagacaccttctttgtgattggttcttcttgagtactttgtcatgtcagaaatagtgttggaggttagggcatttgtcagtcctgcgggcttagtattattgccctcatttaagagggatagaagggaaaaactgagaagatatgtgtctagtgtcacatagcttgttagtgcctgagccagcactgtcacactccctgcacacatgctctggggtctagtcctggtttggctggtctacatactgtgtcactttgagatcccttcctctaaataaatatttctgatggctctaaggttttatttgtaacattttattccttttgtaaaggatgcccctcaaattgtatatacttcagaccccacataccctgtatccactcctgctttcaatgtaatattcagcagagctcaaaagaatgaattggggagatttttgagaatttatgtttaagtctgaaaaacaacaacaacaacaacaacaacaaaaaatcccataacaaaaacaacagcagcagcagaaactttaacaacaataacaagaacaaatatatcagggacccggaccacgagagcaaatctactagagagctatggaaaagttttgaaagcatctagaaatttaaacatactgctttttctggtacacatttttttaaaaaaacaaaccaaatctagtggacatgcaggctaggaaacatgcatgagattcagaacacccatgtgcctagctaagtgttaggaattatactgccaaggaagccagttatgagggaaaaggaaaggatgggttggctggtttcacc

SEQ ID NO: 959 - DNA, 69 bp, Homo sapiens
ttaaaacaatgtcaaggtgctgttgtcattgctttactggcttaggggatgggggatggggggtatatt

SEQ ID NO: 960 - DNA, 46 bp, Homo sapiens
gtgcgggcccttaccatggatagcaaaaagagaattggctggcgat

SEQ ID NO: 961 - DNA, 46 bp, Homo sapiens
agtgcaatcccatgggttacacaaaagaaggctgcaggggcataga

SEQ ID NO: 962 - DNA, 44 bp, Homo sapiens
catgtccatgagggtccggcgccactctgaccctgcccgccgag

SEQ ID NO: 963 - DNA, 85 bp, Homo sapiens
ggtaaatattatatggtttcaataacatagtagatagaacattgtcaaatctaaacttcagtgaattgtaacagatcccacctga

SEQ ID NO: 964 - DNA, 46 bp, Homo sapiens
gtagtttattaacattttgagatgtaggaaattaatcccggagtac

SEQ ID NO: 965 - DNA, 37 bp, Homo sapiens
tttttttgggaaatttacctctgggttagcaggagag

SEQ ID NO: 966 - DNA, 43 bp, Homo sapiens
agcaaagacggcgacccggggatccctcgcagccctcccccag

SEQ ID NO: 967 - DNA, 4069 bp, Homo sapiens
gttgtgaccacccaggtgtagaataaagaacagtggaattgggagccctgagttctaacataaactttcttcatgacataaggcaagtcttctatggcctttggtttccttacctgtaaaacaggatggctcaatgaaattatctttcttctttgctataatagagtatctctgtgggaagaggaaaaaaaaagtcaatttaaaggctccttatagttccccaactgctgttttattgtgctattcatgcctagacatcacatagctagaaaggcccatcagacccctcaggccactgctgttcctgtcacacattcctgcaaaggaccatgttgctaacttgaaaaaaattactattaattacacttgcagttgttgcttagtaacatttatgattttgtgtttctcgtgacagcatgagcagagatcattaaaaattaaacttacaaagctgctaaagtgggaagaaggagaacttgaagccacaatttttgcacttgcttagaagccatctaatctcaggtttatatgctagatcttgggggaaacactgcatgtctctggtttatattaaaccacatacagcacactactgacactgatttgtgtctggtgcagctggagtttatcaccaagacataaaaaaaccttgaccctgcagaatggcctggaattacaatcagatgggccacatggcatcccggtgaaagaaagccctaaccagttttctgtcttgtttctgctttctccctacagttccaccaggtgagaagagtgatgaccatccttttccttactatggttatttcatactttggttgcatgaaggctgcccccatgaaagaagcaaacatccgaggacaaggtggcttggcctacccaggtgtgcggacccatgggactctggagagcgtgaatgggcccaaggcaggttcaagaggcttgacatcattggctgacactttcgaacacgtgatagaagagctgttggatgaggaccagaaagttcggcccaatgaagaaaacaataaggacgcagacttgtacacgtccagggtgatgctcagtagtcaagtgcctttggagcctcctcttctctttctgctggaggaatacaaaaattacctagatgctgcaaacatgtccatgagggtccggcgccactctgaccctgcccgccgaggggagctgagcgtgtgtgacagtattagtgagtgggtaacggcagcagacaaaaagactgcagtggacatgtcgggcgggacggtcacagtccttgaaaaggtccctgtatcaaaaggccaactgaagcaatacttctacgagaccaagtgcaatcccatgggttacacaaaagaaggctgcaggggcatagacaaaaggcattggaactcccagtgccgaactacccagtcgtacgtgcgggcccttaccatggatagcaaaaagagaattggctggcgattcataaggatagacacttcttgtgtatgtacattgaccattaaaaggggaagatagtggatttatgttgtatagattagattatattgagacaaaaattatctatttgtatatatacataacagggtaaattattcagttaagaaaaaaataattttatgaactgcatgtataaatgaagtttatacagtacagtggttctacaatctatttattggacatgtccatgaccagaagggaaacagtcatttgcgcacaacttaaaaagtctgcattacattccttgataatgttgtggtttgttgccgttgccaagaactgaaaacataaaaagttaaaaaaaataataaattgcatgctgctttaattgtgaattgataataaactgtcctctttcagaaaacagaaaaaaaacacacacacacacaacaaaaatttgaaccaaaacattccgtttacattttagacagtaagtatcttcgttcttgttagtactatatctgttttactgcttttaacttctgatagcgttggaattaaaacaatgtcaaggtgctgttgtcattgctttactggcttaggggatgggggatggggggtatatttttgtttgttttgtgtttttttttcgtttgtttgttttgttttttagttcccacagggagtagagatggggaaagaattcctacaatatatattctggctgataaaagatacatttgtatgttgtgaagatgtttgcaatatcgatcagatgactagaaagtgaataaaaattaaggcaactgaacaaaaaaatgctcacactccacatcccgtgatgcacctcccaggccccgctcattctttgggcgttggtcagagtaagctgcttttgacggaaggacctatgtttgctcagaacacattctttccccccctccccctctggtctcctctttgttttgttttaaggaagaaaaatcagttgcgcgttctgaaatattttaccactgctgtgaacaagtgaacacattgtgtcacatcatgacactcgtataagcatggagaacagtgatttttttttagaacagaaaacaacaaaaaataaccccaaaatgaagattattttttatgaggagtgaacatttgggtaaatcatggctaagcttaaaaaaaactcatggtgaggcttaacaatgtcttgtaagcaaaaggtagagccctgtatcaacccagaaacacctagatcagaacaggaatccacattgccagtgacatgagactgaacagccaaatggaggctatgtggagttggcattgcatttaccggcagtgcgggaggaatttctgagtggccatcccaaggtctaggtggaggtggggcatggtatttgagacattccaaaacgaaggcctctgaaggacccttcagaggtggctctggaatgacatgtgtcaagctgcttggacctcgtgctttaagtgcctacattatctaactgtgctcaagaggttctcgactggaggaccacactcaagccgacttatgcccaccatcccacctctggataattttgcataaaattggattagcctggagcaggttgggagccaaatgtggcatttgtgatcatgagattgatgcaatgagatagaagatgtttgctacctgaacacttattgctttgaaactagacttgaggaaaccagggtttatcttttgagaacttttggtaagggaaaagggaacaggaaaagaaaccccaaactcaggccgaatgatcaaggggacccataggaaatcttgtccagagacaagacttcgggaaggtgtctggacattcagaacaccaagacttgaaggtgccttgctcaatggaagaggccaggacagagctgacaaaattttgctccccagtgaaggccacagcaaccttctgcccatcctgtctgttcatggagagggtccctgcctcacctctgccattttgggttaggagaagtcaagttgggagcctgaaatagtggttcttggaaaaatggatccccagtgaaaactagagctctaagcccattcagcccatttcacacctgaaaatgttagtgatcaccacttggaccagcatccttaagtatcagaaagccccaagcaattgctgcatcttagtagggtgagggataagcaaaagaggatgttcaccataacccaggaatgaagataccatcagcaaagaatttcaatttgttcagtctttcatttagagctagtctttcacagtaccatctgaatacctctttgaaagaaggaagactttacgtagtgtagatttgttttgtgttgtttgaaaatattatctttgtaattatttttaatatgtaaggaatgcttggaatatctgctgtatgtcaactttatgcagcttccttttgagggacaaatttaaaacaaacaaccccccatcacaaacttaaaggattgcaagggccagatctgttaagtggtttcataggagacacatccagcaattgtgtggtcagtggctcttttacccaataagatacatcacagtcacatgcttgatggtttatgttgacctaagatttattttgttaaaatctctct

SEQ ID NO: 968 - DNA, 4046 bp, Homo sapiens
cttgggttggtccataggtatgttttcattttgcttgttcatccattttaattggcttcctagagcatgcttgtagatgtagagccaaatttagagtagagcaaccctctggcaaacaggaagagattaattttgtggtatgcttttaagggacttcccaggaaacttcaaaagcagaaaaagaagcactagctgcctattccaaaatgtgtaaaacaccactcagctttttaaaagtaggataaactcagagcgcgcgcacacgcgcgcgcgcacacacacacacacacacagagagaacatctctagtaaaaagaaaagttgagctttcttagctagatgtgtgtattagccagaaaaagccaaggagtgaagggttttagagaactggaggagataaagtggagtctgcatatgggaggcatttgaaatggacttaaatgtctttttaatgctgactttttcagttttctccttaccagacacattgttttcatgacattagccccaggcatagacacatcattaaaatgaacatgtcaaaaaatgatttctgtttagaaataagcaaaacattttcagttgtgaccacccaggtgtagaataaagaacagtggaattgggagccctgagttctaacataaactttcttcatgacataaggcaagtcttctatggcctttggtttccttacctgtaaaacaggatggctcaatgaaattatctttcttctttgctataatagagtatctctgtgggaagaggaaaaaaaaagtcaatttaaaggctccttatagttccccaactgctgttttattgtgctattcatgcctagacatcacatagctagaaaggcccatcagacccctcaggccactgctgttcctgtcacacattcctgcaaaggaccatgttgctaacttgaaaaaaattactattaattacacttgcagttgttgcttagtaacatttatgattttgtgtttctcgtgacagcatgagcagagatcattaaaaattaaacttacaaagctgctaaagtgggaagaaggagaacttgaagccacaatttttgcacttgcttagaagccatctaatctcaggtttatatgctagatcttgggggaaacactgcatgtctctggtttatattaaaccacatacagcacactactgacactgatttgtgtctggtgcagctggagtttatcaccaagacataaaaaaaccttgaccctgcagaatggcctggaattacaatcagatgggccacatggcatcccggtgaaagaaagccctaaccagttttctgtcttgtttctgctttctccctacagttccaccaggtgagaagagtgatgaccatccttttccttactatggttatttcatactttggttgcatgaaggctgcccccatgaaagaagcaaacatccgaggacaaggtggcttggcctacccaggtgtgcggacccatgggactctggagagcgtgaatgggcccaaggcaggttcaagaggcttgacatcattggctgacactttcgaacacgtgatagaagagctgttggatgaggaccagaaagttcggcccaatgaagaaaacaataaggacgcagacttgtacacgtccagggtgatgctcagtagtcaagtgcctttggagcctcctcttctctttctgctggaggaatacaaaaattacctagatgctgcaaacatgtccatgagggtccggcgccactctgaccctgcccgccgaggggagctgagcgtgtgtgacagtattagtgagtgggtaacggcagcagacaaaaagactgcagtggacatgtcgggcgggacggtcacagtccttgaaaaggtccctgtatcaaaaggccaactgaagcaatacttctacgagaccaagtgcaatcccatgggttacacaaaagaaggctgcaggggcatagacaaaaggcattggaactcccagtgccgaactacccagtcgtacgtgcgggcccttaccatggatagcaaaaagagaattggctggcgattcataaggatagacacttcttgtgtatgtacattgaccattaaaaggggaagatagtggatttatgttgtatagattagattatattgagacaaaaattatctatttgtatatatacataacagggtaaattattcagttaagaaaaaaataattttatgaactgcatgtataaatgaagtttatacagtacagtggttctacaatctatttattggacatgtccatgaccagaagggaaacagtcatttgcgcacaacttaaaaagtctgcattacattccttgataatgttgtggtttgttgccgttgccaagaactgaaaacataaaaagttaaaaaaaataataaattgcatgctgctttaattgtgaattgataataaactgtcctctttcagaaaacagaaaaaaaacacacacacacacaacaaaaatttgaaccaaaacattccgtttacattttagacagtaagtatcttcgttcttgttagtactatatctgttttactgcttttaacttctgatagcgttggaattaaaacaatgtcaaggtgctgttgtcattgctttactggcttaggggatgggggatggggggtatatttttgtttgttttgtgtttttttttcgtttgtttgttttgttttttagttcccacagggagtagagatggggaaagaattcctacaatatatattctggctgataaaagatacatttgtatgttgtgaagatgtttgcaatatcgatcagatgactagaaagtgaataaaaattaaggcaactgaacaaaaaaatgctcacactccacatcccgtgatgcacctcccaggccccgctcattctttgggcgttggtcagagtaagctgcttttgacggaaggacctatgtttgctcagaacacattctttccccccctccccctctggtctcctctttgttttgttttaaggaagaaaaatcagttgcgcgttctgaaatattttaccactgctgtgaacaagtgaacacattgtgtcacatcatgacactcgtataagcatggagaacagtgatttttttttagaacagaaaacaacaaaaaataaccccaaaatgaagattattttttatgaggagtgaacatttgggtaaatcatggctaagcttaaaaaaaactcatggtgaggcttaacaatgtcttgtaagcaaaaggtagagccctgtatcaacccagaaacacctagatcagaacaggaatccacattgccagtgacatgagactgaacagccaaatggaggctatgtggagttggcattgcatttaccggcagtgcgggaggaatttctgagtggccatcccaaggtctaggtggaggtggggcatggtatttgagacattccaaaacgaaggcctctgaaggacccttcagaggtggctctggaatgacatgtgtcaagctgcttggacctcgtgctttaagtgcctacattatctaactgtgctcaagaggttctcgactggaggaccacactcaagccgacttatgcccaccatcccacctctggataattttgcataaaattggattagcctggagcaggttgggagccaaatgtggcatttgtgatcatgagattgatgcaatgagatagaagatgtttgctacctgaacacttattgctttgaaactagacttgaggaaaccagggtttatcttttgagaacttttggtaagggaaaagggaacaggaaaagaaaccccaaactcaggccgaatgatcaaggggacccataggaaatcttgtccagagacaagacttcgggaaggtgtctggacattcagaacaccaagacttgaaggtgccttgctcaatggaagaggccaggacagagctgacaaaattttgctccccagtgaaggccacagcaaccttctgcccatcctgtctgttcatggagagggtccctgcctcacctctgccattttgggttaggagaagtcaagttgggagcctg

SEQ ID NO: 969 - DNA, 4046 bp, Homo sapiens
ggtcagggctggggatgctactctttgctgctgagaaacacaatgcttcaggtaagtgattctgaagtccttcaccacctgacggtaaccttgggttggtccataggtatgttttcattttgcttgttcatccattttaattggcttcctagagcatgcttgtagatgtagagccaaatttagagtagagcaaccctctggcaaacaggaagagattaattttgtggtatgcttttaagggacttcccaggaaacttcaaaagcagaaaaagaagcactagctgcctattccaaaatgtgtaaaacaccactcagctttttaaaagtaggataaactcagagcgcgcgcacacgcgcgcgcgcacacacacacacacacacagagagaacatctctagtaaaaagaaaagttgagctttcttagctagatgtgtgtattagccagaaaaagccaaggagtgaagggttttagagaactggaggagataaagtggagtctgcatatgggaggcatttgaaatggacttaaatgtctttttaatgctgactttttcagttttctccttaccagacacattgttttcatgacattagccccaggcatagacacatcattaaaatgaacatgtcaaaaaatgatttctgtttagaaataagcaaaacattttcagttgtgaccacccaggtgtagaataaagaacagtggaattgggagccctgagttctaacataaactttcttcatgacataaggcaagtcttctatggcctttggtttccttacctgtaaaacaggatggctcaatgaaattatctttcttctttgctataatagagtatctctgtgggaagaggaaaaaaaaagtcaatttaaaggctccttatagttccccaactgctgttttattgtgctattcatgcctagacatcacatagctagaaaggcccatcagacccctcaggccactgctgttcctgtcacacattcctgcaaaggaccatgttgctaacttgaaaaaaattactattaattacacttgcagttgttgcttagtaacatttatgattttgtgtttctcgtgacagcatgagcagagatcattaaaaattaaacttacaaagctgctaaagtgggaagaaggagaacttgaagccacaatttttgcacttgcttagaagccatctaatctcaggtttatatgctagatcttgggggaaacactgcatgtctctggtttatattaaaccacatacagcacactactgacactgatttgtgtctggtgcagctggagtttatcaccaagacataaaaaaaccttgaccctgcagaatggcctggaattacaatcagatgggccacatggcatcccggtgaaagaaagccctaaccagttttctgtcttgtttctgctttctccctacagttccaccaggtgagaagagtgatgaccatccttttccttactatggttatttcatactttggttgcatgaaggctgcccccatgaaagaagcaaacatccgaggacaaggtggcttggcctacccaggtgtgcggacccatgggactctggagagcgtgaatgggcccaaggcaggttcaagaggcttgacatcattggctgacactttcgaacacgtgatagaagagctgttggatgaggaccagaaagttcggcccaatgaagaaaacaataaggacgcagacttgtacacgtccagggtgatgctcagtagtcaagtgcctttggagcctcctcttctctttctgctggaggaatacaaaaattacctagatgctgcaaacatgtccatgagggtccggcgccactctgaccctgcccgccgaggggagctgagcgtgtgtgacagtattagtgagtgggtaacggcagcagacaaaaagactgcagtggacatgtcgggcgggacggtcacagtccttgaaaaggtccctgtatcaaaaggccaactgaagcaatacttctacgagaccaagtgcaatcccatgggttacacaaaagaaggctgcaggggcatagacaaaaggcattggaactcccagtgccgaactacccagtcgtacgtgcgggcccttaccatggatagcaaaaagagaattggctggcgattcataaggatagacacttcttgtgtatgtacattgaccattaaaaggggaagatagtggatttatgttgtatagattagattatattgagacaaaaattatctatttgtatatatacataacagggtaaattattcagttaagaaaaaaataattttatgaactgcatgtataaatgaagtttatacagtacagtggttctacaatctatttattggacatgtccatgaccagaagggaaacagtcatttgcgcacaacttaaaaagtctgcattacattccttgataatgttgtggtttgttgccgttgccaagaactgaaaacataaaaagttaaaaaaaataataaattgcatgctgctttaattgtgaattgataataaactgtcctctttcagaaaacagaaaaaaaacacacacacacacaacaaaaatttgaaccaaaacattccgtttacattttagacagtaagtatcttcgttcttgttagtactatatctgttttactgcttttaacttctgatagcgttggaattaaaacaatgtcaaggtgctgttgtcattgctttactggcttaggggatgggggatggggggtatatttttgtttgttttgtgtttttttttcgtttgtttgttttgttttttagttcccacagggagtagagatggggaaagaattcctacaatatatattctggctgataaaagatacatttgtatgttgtgaagatgtttgcaatatcgatcagatgactagaaagtgaataaaaattaaggcaactgaacaaaaaaatgctcacactccacatcccgtgatgcacctcccaggccccgctcattctttgggcgttggtcagagtaagctgcttttgacggaaggacctatgtttgctcagaacacattctttccccccctccccctctggtctcctctttgttttgttttaaggaagaaaaatcagttgcgcgttctgaaatattttaccactgctgtgaacaagtgaacacattgtgtcacatcatgacactcgtataagcatggagaacagtgatttttttttagaacagaaaacaacaaaaaataaccccaaaatgaagattattttttatgaggagtgaacatttgggtaaatcatggctaagcttaaaaaaaactcatggtgaggcttaacaatgtcttgtaagcaaaaggtagagccctgtatcaacccagaaacacctagatcagaacaggaatccacattgccagtgacatgagactgaacagccaaatggaggctatgtggagttggcattgcatttaccggcagtgcgggaggaatttctgagtggccatcccaaggtctaggtggaggtggggcatggtatttgagacattccaaaacgaaggcctctgaaggacccttcagaggtggctctggaatgacatgtgtcaagctgcttggacctcgtgctttaagtgcctacattatctaactgtgctcaagaggttctcgactggaggaccacactcaagccgacttatgcccaccatcccacctctggataattttgcataaaattggattagcctggagcaggttgggagccaaatgtggcatttgtgatcatgagattgatgcaatgagatagaagatgtttgctacctgaacacttattgctttgaaactagacttgaggaaaccagggtttatcttttgagaacttttggtaagggaaaagggaacaggaaaagaaaccccaaactcaggccgaatgatcaaggggacccataggaaatcttgtccagagacaagacttcgggaaggtgtctggacattcagaacaccaagacttgaaggtgccttgctcaatggaagaggccaggacagagctgacaaaattttgctccccagtgaaggccacag

SEQ ID NO: 970 - DNA, 4044 bp, Homo sapiens
ataccagagttttcagccatttctgcattctgacctattgactggaggtaggttgcctttgaattcagtaaaacttcatgggcagaaacacagttccttttcctacttatttggatatcatgatggccattgcatgtatgtgtctttttgtaagtccatgcctcagaactgagaagtaggaataaaattagggtcagggctggggatgctactctttgctgctgagaaacacaatgcttcaggtaagtgattctgaagtccttcaccacctgacggtaaccttgggttggtccataggtatgttttcattttgcttgttcatccattttaattggcttcctagagcatgcttgtagatgtagagccaaatttagagtagagcaaccctctggcaaacaggaagagattaattttgtggtatgcttttaagggacttcccaggaaacttcaaaagcagaaaaagaagcactagctgcctattccaaaatgtgtaaaacaccactcagctttttaaaagtaggataaactcagagcgcgcgcacacgcgcgcgcgcacacacacacacacacacagagagaacatctctagtaaaaagaaaagttgagctttcttagctagatgtgtgtattagccagaaaaagccaaggagtgaagggttttagagaactggaggagataaagtggagtctgcatatgggaggcatttgaaatggacttaaatgtctttttaatgctgactttttcagttttctccttaccagacacattgttttcatgacattagccccaggcatagacacatcattaaaatgaacatgtcaaaaaatgatttctgtttagaaataagcaaaacattttcagttgtgaccacccaggtgtagaataaagaacagtggaattgggagccctgagttctaacataaactttcttcatgacataaggcaagtcttctatggcctttggtttccttacctgtaaaacaggatggctcaatgaaattatctttcttctttgctataatagagtatctctgtgggaagaggaaaaaaaaagtcaatttaaaggctccttatagttccccaactgctgttttattgtgctattcatgcctagacatcacatagctagaaaggcccatcagacccctcaggccactgctgttcctgtcacacattcctgcaaaggaccatgttgctaacttgaaaaaaattactattaattacacttgcagttgttgcttagtaacatttatgattttgtgtttctcgtgacagcatgagcagagatcattaaaaattaaacttacaaagctgctaaagtgggaagaaggagaacttgaagccacaatttttgcacttgcttagaagccatctaatctcaggtttatatgctagatcttgggggaaacactgcatgtctctggtttatattaaaccacatacagcacactactgacactgatttgtgtctggtgcagctggagtttatcaccaagacataaaaaaaccttgaccctgcagaatggcctggaattacaatcagatgggccacatggcatcccggtgaaagaaagccctaaccagttttctgtcttgtttctgctttctccctacagttccaccaggtgagaagagtgatgaccatccttttccttactatggttatttcatactttggttgcatgaaggctgcccccatgaaagaagcaaacatccgaggacaaggtggcttggcctacccaggtgtgcggacccatgggactctggagagcgtgaatgggcccaaggcaggttcaagaggcttgacatcattggctgacactttcgaacacgtgatagaagagctgttggatgaggaccagaaagttcggcccaatgaagaaaacaataaggacgcagacttgtacacgtccagggtgatgctcagtagtcaagtgcctttggagcctcctcttctctttctgctggaggaatacaaaaattacctagatgctgcaaacatgtccatgagggtccggcgccactctgaccctgcccgccgaggggagctgagcgtgtgtgacagtattagtgagtgggtaacggcagcagacaaaaagactgcagtggacatgtcgggcgggacggtcacagtccttgaaaaggtccctgtatcaaaaggccaactgaagcaatacttctacgagaccaagtgcaatcccatgggttacacaaaagaaggctgcaggggcatagacaaaaggcattggaactcccagtgccgaactacccagtcgtacgtgcgggcccttaccatggatagcaaaaagagaattggctggcgattcataaggatagacacttcttgtgtatgtacattgaccattaaaaggggaagatagtggatttatgttgtatagattagattatattgagacaaaaattatctatttgtatatatacataacagggtaaattattcagttaagaaaaaaataattttatgaactgcatgtataaatgaagtttatacagtacagtggttctacaatctatttattggacatgtccatgaccagaagggaaacagtcatttgcgcacaacttaaaaagtctgcattacattccttgataatgttgtggtttgttgccgttgccaagaactgaaaacataaaaagttaaaaaaaataataaattgcatgctgctttaattgtgaattgataataaactgtcctctttcagaaaacagaaaaaaaacacacacacacacaacaaaaatttgaaccaaaacattccgtttacattttagacagtaagtatcttcgttcttgttagtactatatctgttttactgcttttaacttctgatagcgttggaattaaaacaatgtcaaggtgctgttgtcattgctttactggcttaggggatgggggatggggggtatatttttgtttgttttgtgtttttttttcgtttgtttgttttgttttttagttcccacagggagtagagatggggaaagaattcctacaatatatattctggctgataaaagatacatttgtatgttgtgaagatgtttgcaatatcgatcagatgactagaaagtgaataaaaattaaggcaactgaacaaaaaaatgctcacactccacatcccgtgatgcacctcccaggccccgctcattctttgggcgttggtcagagtaagctgcttttgacggaaggacctatgtttgctcagaacacattctttccccccctccccctctggtctcctctttgttttgttttaaggaagaaaaatcagttgcgcgttctgaaatattttaccactgctgtgaacaagtgaacacattgtgtcacatcatgacactcgtataagcatggagaacagtgatttttttttagaacagaaaacaacaaaaaataaccccaaaatgaagattattttttatgaggagtgaacatttgggtaaatcatggctaagcttaaaaaaaactcatggtgaggcttaacaatgtcttgtaagcaaaaggtagagccctgtatcaacccagaaacacctagatcagaacaggaatccacattgccagtgacatgagactgaacagccaaatggaggctatgtggagttggcattgcatttaccggcagtgcgggaggaatttctgagtggccatcccaaggtctaggtggaggtggggcatggtatttgagacattccaaaacgaaggcctctgaaggacccttcagaggtggctctggaatgacatgtgtcaagctgcttggacctcgtgctttaagtgcctacattatctaactgtgctcaagaggttctcgactggaggaccacactcaagccgacttatgcccaccatcccacctctggataattttgcataaaattggattagcctggagcaggttgggagccaaatgtggcatttgtgatcatgagattgatgcaatgagatagaagatgtttgctacctgaacacttattgctttgaaactagacttgaggaaaccagggtttatcttttgagaacttttggtaa

SEQ ID NO: 971 - DNA, 4085 bp, Homo sapiens
attttatttctccttcacttatgaagcttagtttggctggatatgaaattctgggttgaaaattcttttctttaagaatgttgaatattggcccccactctcttctggcttgtagagtttctgccgaaagatgctgttagtctgatggacttccctttgtgggtaacctgccctttctctctcgctgcacttaatgttttttccttcatttcaactttggtgaatctgacaattatgtgtctttgagttactcttcttgaggagtatctttgcggcattctctgtatttcctgaatttgaatgctggcctgcctcactagattggggaagttctcctggataatatcctgcagagcgttttccaacttggttccattctccccatcactttcaggtacaccaatcagatgtagatttggtcttttcacatagtcccatatttcttggaggctttgttcatttctttttactcttttttctctaaacttctcttcttgcttcatttcattcatttgatcttcaatccctttcttccacttgattgaatcagctactgaagcttgtgcatgtgtcacatagttctcgtgccatggttttcagctccatcaggtcatttaaggtcttctctatgctgttttttctagttagccattcgtctaatgttttttcaaggtttttagcttctttgctaaaaggttcaaacatcctcctttagctcggaggagtttgttattactgatcatctgaagccttcttctctcaacttgtgaaagtcattctctgtccagctttgttccattgctggcgaggagctgcattcctttggaggagaagacgtgctctgatttttagaattttcagcttctctgctctggtttctccccatcttattggttttatctacctttggtctttgatgatggtgacgtacagatggggttttggtgtggatgttctttctctttgttagttttccttctaacagtcaggaccctcagctgcaggtctgttggagtttgctggaggtccactccagaccctgtttgcttgggtatcaccagcagaggctgcagaacagcaaatattgcagaacggcaaatgttgctccctgattgttcctctggaagcttcgtctcagaggggcacctggccgtatgaggtgtcagtcggcccctactgggaggtgcctcccagttaggctactcaggggtcaggaacccacttgaagaggcagactgtccattctcagatatcatattccatgctgggaggacccctactcttttcaaagctgtcagacagggacatttaagtctgcagaagtttctgctgtcttttgttcagctgtgccctgcccctagaggtggagtctacagaggcaggcaggcctccttgagctgcggtgggctccacccatttcgagcttcctggctgctttgtttacctactcaagtctcagcaatggtggacacccctcccccagcctcgctgctgctttgcagttcgatctcagactgctgtgctagcagtgagccaggctccgtgggcatgggaccctccgagccaggcctgggacataatctcctggtgtgccgtttgctaagaccattggaaaagcacagtattagggtggggagtgtcctgattttccaggtaccgtcagtcatggcttcccttggctaggaaagggaattccccaaccccttgtgcttcctgggtgaggtgatgccccaccctgctttggctcatgctccgtgggttgtacccactgtctgacaagccccagtgagatgaacccggtacctcagttggaaatgcagaaatcacccgtcttctgcatcactcacgctgggggctgtagactggagctgttcatatttggccatcttggaacctccctttccaagttctttattacagagtgggtcactgaaacttcatggaacaaattggaaattatcttcttaattaatgtcactgtctaccatgtatgggaatttggtaaatattatatggtttcaataacatagtagatagaacattgtcaaatctaaacttcagtgaattgtaacagatcccacctgaaattctaaagaaaacagaattctaattgaagaggttaaacttttacagggaatgtcaactgccatttgggtcctgtaaacaaaaaactgttttttaaaaaagtaaactttaaaagtattttcagatgacctcatttgctatccaagtggcttgagtatgcttgatgctaagacttctttgttacagactggagatgtgtgctactggggcagtgttgctctgtgacaaggaggcagaggatgagggcaaggttcgatgtgactgtgaattctgggtggctctggctatcgggagccttcattgattacagcaaaacagttgctttcctagggcaatagtgtctctgtcacccaggctggagttcagtggcatgatcaatcgctcactgtagcctcaacttcttagactcaagtaatcctcccacctcagcctcccaagtagctgaaactacaggtgtgcaccaccacacctaatttttttaatttttaagtttttgtagagacatggtctcactgtgttgcccaggttgatctcgaattcctgggctctagtgatcctcccgcctcggcctcccaaagtgttgggattacaaatgtgagccactgcacctggccctttgcaaccttcttgacaatgcattcctttattccctaactggaagtaacttctttctctttataaaattgtatctgtaccttttctgggtcatttctacctttatattctagttacgtatgtcctacctccctcctagggagggaggtaagtaagactggaaagtagacttcatgtgtgatgaatgaatgaacaaaaggaagtctaacatatggatatagtcaactggatgcaaattaaaaatttttaaatattgatttgcaagatttcattaaggtcaactcttaatagtttgtatcatatatgttaggaaccaaatattaataacttcttcagcattaccattatctttataggactgtctaaaatgagcagccatatctttaaactgtgttttctctgattacacgctcacaggtaaaacccaaaggggctgggaacaaacaagacttttttttttttctgtatgcctgaattatctgtactgttgcttgttttcccacctttggccatagaaacttagttctaacatgctacaatttttgcagttctttctcttagaaaaagaccacattgtctgaaatttcatccatttaagtaatcaagccttaaagttgaaggatcttggtcatgattaatctagacctacaaagtagtatcttaatggcactccttttagaaagttaggttccaggacacacatagctgcagtgtccacattttgtaagctccttcgttgtcacagccactctcttctctgtggctgatattctaaaactggcaacacatcctgatggtaaaagcttggttcaggagacaggtgacctactagctttatggcatttgacaggttacctaacctctctgacgcataattgcctcatctatataatggggataataatacccatcctgtctccttgtaaaaatcaaattagatgacgcctgtgaatgttctatagtctcttagacaaatgtaagttatgactacagcaagagtaaaagagcatgttgttatggacattctttcagtgaaatgtctaagacttgtgagtcacacttaaagctaaacttgatatctacttcattgattttctttttagttctatgtactatattgaatttcctgacagtggggctatgaaagccttcctagcattttatagatgtggttgaattaatggctgtaagccttaaagcagaattagacagcatcaatgaatttattaagtataaataaatatataatctgcttagcaatattacacagcctctttatcttatgtgtgataaagagtcatccgaaggttgaaaatgaagaattgtcctggaagctcttacttaatcttttattatttcctaatacagtatataaaattactcat

SEQ ID NO: 972 - DNA, 4046 bp, Homo sapiens
cggtggggcgtgcgactcgtcgtcggtggattttgactcctcgttcttgtttggcttctatgcaagttttcctcgcgctgggggagctttgataagcctcgattggcggtgtgttagggcttcttggatcttattttagggtcctctagttatcctgcacttactccttaatgtcagtagcaaccaaagaacattttccgacaagcacgcaggaatgttcttggccagaagcaaagaaaggcatatttctgagtgtttattaatcctcctagtaatcttttaaagcaaagtaatatgtaattgggaacgttgattttctaactgcatataaaaggcgacatgatattaaatgagacccctccctactgactcaatatcctgcaaaatctctctctcccctttattattatggaaaaatctatttttatatgagtttgttgtaaggtcaaaagccattttggtcttacaatttgatatgtctttacattttaacttattgaggcataattacagatttaatttgtatgaacgtgtgtgccttcaatgcttatctcatgcaacataatttttaggttggagatttctgatgttatggcatgtagcgtttcaaggcattacacataataggtaacatagcatgttgaaattacaccacaaagttttgaccctgggaacagcaccttttaaaaacaatcactaaactcctgttcctgttttctgattttgcaaatgccttgcttaagacttttttttttttttttttttttttttttttgggaaatttacctctgggttagcaggagaggtaaaaaaaaggaaagagacacttgttgaaatgtaaccataacctttactggaatttaaaacatgttggtcaccattactggaattccagggccataaagtcgttgtcttttttttcttctacttcattttgtaaaatgtgataaatgttggtaaatatagaccagtagtaagtattatgacactaaaagcattatgtatgtggaactattttaagttattacagaacattttctatttataaatgatataagcagaaagaaatgatttccagataaacaaggcttacgtacatgttttgaagcattagaacattgcagacactcttagacatcacattttttaaagcaaaataacagtaatttttcacatacctttggagcctttcatagcccattcagagctgagttagtagctggaagtttcctttattttaaggtgatattttaaaaccatttaacatgtatagtaggtcaacattggtgcatccagaaaatgaagcatttaggaaatctgtttcagtgtcttttcaatgtgtgtaacttttacttgcaaaccaatggaaccaagaaagtcatcatttgcctaaaatgcagtcatcacctcaaatgattcatttatactatgtgagttaattgccttcatctcattaatggccaaggagggaagggaggtcctggggtatttcttgttcattttgactcaccaggagggaaaatcctgtaaaaaaagaaatgcaaatttctaaaatcctggctcaaagtccgtgggtttcctgtttaaaaggggcgccatgaaaatgtaagctattccctttttcctggaatctttaagagtcccagcttttcaatagtcaaaatgtagatgattgatatcatttcttatatgaatagcactggtttgtagttcagcacgcacagtgagctgggcacgcccacctgatagtatagcagagaacttgtttacattctttttacattcatcttctaaaacctggggtgctctctctctctctctctctctctctctctctgtgtgtgtgtgtgtgtgtgtgcgtgcacgtgcgcgtgtgtgtagagggggagagagagagagagagaactgtgaactgtgaaatataacacagccagcagctttgggtctcaatcgtagacttactcttaaggaaatttacagaatggaaaggtcatgttcaagtagtttattaacattttgagatgtaggaaattaatcccggagtacagaagaacaatttcagacttcctgaataaaaacagacagcatagagagtggatgatagctaaactctgaatatcttttgagaagaaaggcactcccatttcaggtgcccataatatggatttgattttagtgattaaaacattaattttcaacttgcatctccctgtgtggaagagttcaatttgtgtgaggggtctcgcctatccaacaaaagtgaatatgtcccttttatagggtaattgctaacttgtctcaacttgttttcaaacaattgttatagagcactcagtttccactaattgcaaaattgttgcttaattgaaggactctcagccatctagtgcagccattcagccactggcaggctctgtgatctcaaactgtgaattgcattttaaagaggaatcgaggagagaattctgtggaattctaggttttaagtgctggctgttgttcaatggaagaggaaatcatttgaacaagaatcgcatcaagttgtgttgtgataaattttctttattaggatgaataacatgcacagatgagcttcaaaagtgaatgagcaaacttactggttacactctgcatccatttactctgtttagtatggagtaatgttaggcaataaatgatgctggcaaatgaaatccgtatgttatttgcatgtggtatttaaacctaggaaacatagagtggctttggtatttgtaggcttagtcatgtgtgtcctaaacgtcctcttaaacttctacttaaggcatagaattatttaatcctaaataattttatacttaagtgcctcactggatttccagaatatttacactgtaaagatttagaaaggtcatgaacccaattattgactatatggaatcattattgatggcagatgcaaaatggagctcactaatgtactgacattgaaaaccttttgcaggggagaggagggggagtggtaaatgtgtgtgttctttaagtggaacaggaaggtattctcttttctgtagaaaaatttgagtatctggtcagataagtgtggaagctttcatttaaattaagtatttaagttcaagtagaagctctagggcacttatcctcttgatgagacaaatcttatcaaatatactagatgctaagaagtggctcattgccctgatgtctcatttatagattgatgtttgaggatgggttgcattaagtgagttagggggctgagtgtgggacaggagaacgattggaaggaagcaaagtaaatttacaagctttagtgacagccataataaagtaaaagtttatttccagagagcctagagagtaaggaacgttatatagttttccccaaaggttcacttgaaagaacttttcattggttgtcatggtagtaatgtcctgattttgaaatctcccagaacctagtagctcttaaacatgctttcatcttggttcctttggtctgacggaaactttatgacgaccctctgtgtttttgacatgcctctgcatttttggagagaggaggtcaggcaagggaggatttcttaaaactaagacagtatagtaaggaaacataaaattatatgataaaaaatcactgaacttcaaattgacttactgaaataaaacctagaaggcaacctgtcgtttaattacaactagcttgtataaaattaaaatttataaaatgggaattcaaagaaaataaacgggcagttccaagtaatttaagcaactcaccaaaaattgaagtaatagtgccacctagagaacaaaatcaccagctttactagccaaatggcttatttccatatgaaccatttttccaacgctacagttactaggatttccttgttaccatattcagatcttgtgagtgtgtatgggggtgggggttgcatgtggaattacagatgaaattttaaaacaagcagatccacaatttgatatatgcactaaatccttttaacgttgtaatgtagccaaatgtagaatagcatgccagg

SEQ ID NO: 973 - DNA, 4037 bp, Homo sapiens
ctggagccagaatcggaaccacgatgtgactccgccgccggggacccgtgaggtttgtgtggaccccgaggtaggcaagcgctgggaatggggcttggtgcaggagctgcccgtccgcgggagagagttgactgggggatcccccaccccaaagttgtgggacgaggccagtctccttctttcctcccctccggtagaagggacgatttggagttactcttggggagttttctcccccatcccacaacccagaaggtcagccggcaccaccagggaaaaagggacccggggaagtcacgaagtagaggagggaaggcctggaggagacccagagctgcgtgatgggagcaaagacggcgacccggggatccctcgcagccctcccccagcccaggagtagtcgagagagacttagggggccagagctgtcgagggtcctgactgaggggagggtgctggggctaggctaggaatccttccagggggtgggtggtccccgcgccgacttgcggggggagtgggagggaagcttgcgccttcagcccgcatcccttccccggagctgcacacggctacctgctccccaggaattgagactgaagtggacttacaagtccgaagccaatgtagcttggaaaacttgggaggcggaattcctaccgctgggaactgaaagggtctgcgacactctcgggcaggccgaacccacatctctacccatcctgcgcccctcttctgaagcgccctccagggaagttaagagttttgactttcggggagtggttgggatgtacgtgggggattcttgactcgggttagtctctggggatgcagagccgggaagaggaatgggtgagtgagttactcctggaaagaaatagctgaggattgggggctctgtgcctgacgggcaagaagaaggggagattacagactaggggcatccctaaggaagaagcctcggggctgcgagggtgaactggaggatgcagtgtttgtgtgttgggggtagagcggggatgagggaccggggtggaggggaggcgaggaggaggaggggacccagagaacgaagctagggaaggtagagggtgccctctgccggccatgctgccaagagcagctactgggggcgggaggctgggggtggggaagtggtaaaggaaggttttgcgggatcccttagagagctggtaggagggacttgttgaatggtgctgctgactccagctcggtggggcgtgcgactcgtcgtcggtggattttgactcctcgttcttgtttggcttctatgcaagttttcctcgcgctgggggagctttgataagcctcgattggcggtgtgttagggcttcttggatcttattttagggtcctctagttatcctgcacttactccttaatgtcagtagcaaccaaagaacattttccgacaagcacgcaggaatgttcttggccagaagcaaagaaaggcatatttctgagtgtttattaatcctcctagtaatcttttaaagcaaagtaatatgtaattgggaacgttgattttctaactgcatataaaaggcgacatgatattaaatgagacccctccctactgactcaatatcctgcaaaatctctctctcccctttattattatggaaaaatctatttttatatgagtttgttgtaaggtcaaaagccattttggtcttacaatttgatatgtctttacattttaacttattgaggcataattacagatttaatttgtatgaacgtgtgtgccttcaatgcttatctcatgcaacataatttttaggttggagatttctgatgttatggcatgtagcgtttcaaggcattacacataataggtaacatagcatgttgaaattacaccacaaagttttgaccctgggaacagcaccttttaaaaacaatcactaaactcctgttcctgttttctgattttgcaaatgccttgcttaagacttttttttttttttttttttttttttttttgggaaatttacctctgggttagcaggagaggtaaaaaaaaggaaagagacacttgttgaaatgtaaccataacctttactggaatttaaaacatgttggtcaccattactggaattccagggccataaagtcgttgtcttttttttcttctacttcattttgtaaaatgtgataaatgttggtaaatatagaccagtagtaagtattatgacactaaaagcattatgtatgtggaactattttaagttattacagaacattttctatttataaatgatataagcagaaagaaatgatttccagataaacaaggcttacgtacatgttttgaagcattagaacattgcagacactcttagacatcacattttttaaagcaaaataacagtaatttttcacatacctttggagcctttcatagcccattcagagctgagttagtagctggaagtttcctttattttaaggtgatattttaaaaccatttaacatgtatagtaggtcaacattggtgcatccagaaaatgaagcatttaggaaatctgtttcagtgtcttttcaatgtgtgtaacttttacttgcaaaccaatggaaccaagaaagtcatcatttgcctaaaatgcagtcatcacctcaaatgattcatttatactatgtgagttaattgccttcatctcattaatggccaaggagggaagggaggtcctggggtatttcttgttcattttgactcaccaggagggaaaatcctgtaaaaaaagaaatgcaaatttctaaaatcctggctcaaagtccgtgggtttcctgtttaaaaggggcgccatgaaaatgtaagctattccctttttcctggaatctttaagagtcccagcttttcaatagtcaaaatgtagatgattgatatcatttcttatatgaatagcactggtttgtagttcagcacgcacagtgagctgggcacgcccacctgatagtatagcagagaacttgtttacattctttttacattcatcttctaaaacctggggtgctctctctctctctctctctctctctctctctgtgtgtgtgtgtgtgtgtgtgcgtgcacgtgcgcgtgtgtgtagagggggagagagagagagagagaactgtgaactgtgaaatataacacagccagcagctttgggtctcaatcgtagacttactcttaaggaaatttacagaatggaaaggtcatgttcaagtagtttattaacattttgagatgtaggaaattaatcccggagtacagaagaacaatttcagacttcctgaataaaaacagacagcatagagagtggatgatagctaaactctgaatatcttttgagaagaaaggcactcccatttcaggtgcccataatatggatttgattttagtgattaaaacattaattttcaacttgcatctccctgtgtggaagagttcaatttgtgtgaggggtctcgcctatccaacaaaagtgaatatgtcccttttatagggtaattgctaacttgtctcaacttgttttcaaacaattgttatagagcactcagtttccactaattgcaaaattgttgcttaattgaaggactctcagccatctagtgcagccattcagccactggcaggctctgtgatctcaaactgtgaattgcattttaaagaggaatcgaggagagaattctgtggaattctaggttttaagtgctggctgttgttcaatggaagaggaaatcatttgaacaagaatcgcatcaagttgtgttgtgataaattttctttattaggatgaataacatgcacagatgagcttcaaaagtgaatgagcaaacttactggttacactctgcatccatttactctgtttagtatggagtaatgttaggcaataaatgatgctggcaaatgaaatccgtatgttatttgcatgtggtatttaaacctaggaaacatagagtggctttggtatttgtaggcttagtcatgtgtgtcctaaacgtcctcttaaacttctacttaaggc

SEQ ID NO: 974 - DNA, 4043 bp, Homo sapiens
ttatttatcttggctgccctggttcgttattaaaagggttagcttatacgtgtgtttgctggggctggaagtgaaaacatctgcaaaagcatgcaatgccctggaacggaactcttctaataaaagatgtatcattttaaatgcgctgaattttgattctggtaattcgtgcactagagtgtctatttcgaggcagcggaggtatcatatgacagcgcacgtcaaggcaccgtggagccctctcgtggactcccacccactttcccattcaccgcggagagggctgctctcgctgccgctccccccggcgaactagcatgaaatctccctgcctctgccgagatcaaatggagcttctcgctgatggggtgcgagtattacctccgccatgcaatttccactatcaataatttaacttctttgctgcagaacagaaggagtacataccgggcaccaaagactcgcgccccctcccccctttaattaagcgaagggaacgtgaaaaaataatagagtgtgggagttttggggccgaagtctttcccggagcagctgccttgatggttactttgacaagtagtgactgaaaaggtgggtttgttttctttctttctctttccgtttttctgtttggtcggctagaaagcgtgtggctttagcgaggtctgtcattgcctgggcttcctggctggaacaagtaacttggtgtaacgttatctgggggcgttcatcaataaaaaatgctgttattatcttgattgaattcctattaggcaaactctagagaggtcagtgcgcgaactctgtttaagccggcgtgtttaaggcagcagagtaaaccaatagcccccatgctctgtgcgatttcattgtgtgctcgcgttcgcaagctccgtagtgcaggaaggtgcgggaaggtgtgtctgtggcccgggaaacgcacgccctctcccagagaacttgggtgctgggatggggaggaaggggagagttgaaagctaggggagcgagacctcggggcgtgcgattctcactcgctccctcccgccccagcgcccacagccggggtttctgcagagggcgcgggacgcggggttccccggggctgaggctggggctggaacacccctcgaagccgcgggcgtcctgtccaaggcgccccaggagggcgcaggactcgcagggcgatgtcgcggggccctaggggaggaggtgaggacaggccccgggggagcggggagttccgggcgcccctcggttccccgcgcgaggaaaagacgcggcgttccctttaagcggccgcctcgaacgggtatcggtagcgcgggcgagcggggagcggggggcggggggcgggggggggggggcggcgccgtttgaccaatcgaagctcaaccgaagagctaaataatgtctgacccgggcgcaaggcgcagcctggagctccgggtccccgacgctgccgccgccgcgcccgggcgcacccgcccgctcgctgtcccgcgcaccccgtagcgcctcgggctcccgggccggacagaggagccagcccggtgcgcccctccacctcctgctcggggggctttaatgagacacccaccgctgctgtggggccggcggggagcagcaccgcgacggggaccggggctgggcgctggagccagaatcggaaccacgatgtgactccgccgccggggacccgtgaggtttgtgtggaccccgaggtaggcaagcgctgggaatggggcttggtgcaggagctgcccgtccgcgggagagagttgactgggggatcccccaccccaaagttgtgggacgaggccagtctccttctttcctcccctccggtagaagggacgatttggagttactcttggggagttttctcccccatcccacaacccagaaggtcagccggcaccaccagggaaaaagggacccggggaagtcacgaagtagaggagggaaggcctggaggagacccagagctgcgtgatgggagcaaagacggcgacccggggatccctcgcagccctcccccagcccaggagtagtcgagagagacttagggggccagagctgtcgagggtcctgactgaggggagggtgctggggctaggctaggaatccttccagggggtgggtggtccccgcgccgacttgcggggggagtgggagggaagcttgcgccttcagcccgcatcccttccccggagctgcacacggctacctgctccccaggaattgagactgaagtggacttacaagtccgaagccaatgtagcttggaaaacttgggaggcggaattcctaccgctgggaactgaaagggtctgcgacactctcgggcaggccgaacccacatctctacccatcctgcgcccctcttctgaagcgccctccagggaagttaagagttttgactttcggggagtggttgggatgtacgtgggggattcttgactcgggttagtctctggggatgcagagccgggaagaggaatgggtgagtgagttactcctggaaagaaatagctgaggattgggggctctgtgcctgacgggcaagaagaaggggagattacagactaggggcatccctaaggaagaagcctcggggctgcgagggtgaactggaggatgcagtgtttgtgtgttgggggtagagcggggatgagggaccggggtggaggggaggcgaggaggaggaggggacccagagaacgaagctagggaaggtagagggtgccctctgccggccatgctgccaagagcagctactgggggcgggaggctgggggtggggaagtggtaaaggaaggttttgcgggatcccttagagagctggtaggagggacttgttgaatggtgctgctgactccagctcggtggggcgtgcgactcgtcgtcggtggattttgactcctcgttcttgtttggcttctatgcaagttttcctcgcgctgggggagctttgataagcctcgattggcggtgtgttagggcttcttggatcttattttagggtcctctagttatcctgcacttactccttaatgtcagtagcaaccaaagaacattttccgacaagcacgcaggaatgttcttggccagaagcaaagaaaggcatatttctgagtgtttattaatcctcctagtaatcttttaaagcaaagtaatatgtaattgggaacgttgattttctaactgcatataaaaggcgacatgatattaaatgagacccctccctactgactcaatatcctgcaaaatctctctctcccctttattattatggaaaaatctatttttatatgagtttgttgtaaggtcaaaagccattttggtcttacaatttgatatgtctttacattttaacttattgaggcataattacagatttaatttgtatgaacgtgtgtgccttcaatgcttatctcatgcaacataatttttaggttggagatttctgatgttatggcatgtagcgtttcaaggcattacacataataggtaacatagcatgttgaaattacaccacaaagttttgaccctgggaacagcaccttttaaaaacaatcactaaactcctgttcctgttttctgattttgcaaatgccttgcttaagacttttttttttttttttttttttttttttttgggaaatttacctctgggttagcaggagaggtaaaaaaaaggaaagagacacttgttgaaatgtaaccataacctttactggaatttaaaacatgttggtcaccattactggaattccagggccataaagtcgttgtcttttttttcttctacttcattttgtaaaatgtgataaatgttggtaaatatagaccagtagtaagtattatgacactaaaagcattatgtatgtggaactattttaagttattacagaacattttctatttataaatgatataagcagaaagaaatgatttccagataaacaaggcttacgtacatgttttgaagcattagaacattgcagacactcttagacatcacattttttaaagcaaaa

SEQ ID NO: 975 - DNA, 46 bp, Homo sapiens
aattgtcctgtttggaatcagtcagaagactagaaggtgatggaga

SEQ ID NO: 976 - DNA, 46 bp, Homo sapiens
ctttttctcctcttcacctccctcttttccgttctctttgctggtg

SEQ ID NO: 977 - DNA, 45 bp, Homo sapiens
aagactgggagtttaggtgtagatggggggtggggttggggggag

SEQ ID NO: 978 - DNA, 50 bp, Homo sapiens
ggttaatttccatctaaaaacaataatgctgttagaggttggggttaggg

SEQ ID NO: 979 - DNA, 4046 bp, Homo sapiens
ctccagcctccatccctccctcattctatctcttcctctccgtcgccctcgctcctcgctggatgcttctttctgggttttcttttttttttcccttctgtcctccctccccgcgagtttcgggcgctggcttagagggttcccgctttctcaagggaaggggagctgccgagaccgcgctccgctccccagccgggccggatgcctcactgagcccaggtccgagtcagtcggggtaactcagggaaaggggagcctccgcctgggagtagaaggtcctttccggaccgaagagccagagagcgggccgggcgagggggcctgggcggctggaggcggtggagaagaacacttttagctccgtgcggcggctggacagagccaccaatcagctggacgcgcagaccgccctgccagggcgaggttgcgtccggaggcgccggtggagggcggccggctagtcgctgagccgccgccgccacccgggtgggcaggggactggcggtgggtggaggtgaggggcttggcgggtgagatagaagcggcgcggagccgcccagacctgtgttctacctctcccgcccccgcctgcacccccgggggacagcgaactgccggaacgcgcggctgcgttatcctcttgccactcttcagggagctcagggacttaggcgcccctgggcgggggccaccaggctctccacactcctataaccctcacccccacccccttctcaggccttttgttccggccacagagccaagcccggtggcagttttcgccccagggtttggtcgttctggactcctcccccgatcagctcttcttaattaaaaggcaagagcttggggtaggggtgaggggaacgtaggaaaaatctgtttccgaaactcaagaccactgttttaacgaacgaaagaaagaatcccaactctgcgcaggtggattcataggcgaagcgaggatattgtggaaattcagaaggaaaagataaaaaacaggcgctaggatcagatgacggtgataggctgctcggcacacaaagggagcgtagggcagggtttacggagcaagcctgcagcgaatggggcacagattgttccgagatccagtcgttttctcagtcagatctacgcgaagggaggggaggggaggggcgggcaggggagcgtggcgggaggggctgagcttgggggcggggggatttctgatcagtctgatgcaattccaagcgtgctgcaaaggaactccaaggcgcccgcatcaccatcgccacccacccttcccagatggtgctgttttaaatacggatctgcagggctgaacgcagaactgggagatttattgcaaaatcccgggaggggcgggggggggtggtgtgcggaacggggaatggaggagcagaatttaaaggtgcaacgcttgctttttccaatcaggcggcaaccggccggaattattatttttttctttctgtctgcttgtctctggattctaattcaccaagaaagaggtgtaaatattgtgacattttgaggcagcttgatggatgggaaagaaatcatctgtcactctaaattgcagagttccctctccccgcgccatcccttgctagcgaatactcgctgctgcctaatacagttgctagggcttcaaatgaatgcatcgttaagggaatattatccttttagttgacttgccaatttagttgacagttgaatcgagaaaattgtagatttcgtgtctctgggaggaaaaatgcttaacagtctaagtcttgtaaccttgaggtctttaacaacttaaataaacctcaaaagtgtcacgtcatcctctacacacacacacacacacacacacacacacactcaacttgtaagatgacatggtttcacctaaactgttgtggaaatgaatagcactttaaaaatggtgcacctgatattcactgtttatgtgtatttacaaagagctcttcagcatgaaggcaagacatttcaattgtcctgtttggaatcagtcagaagactagaaggtgatggagagaagaagggaagaaagaggaaagagagagaattttaacctagatgctattaaattaacagtaacctagcctacttttataccccttggtcttgcatattaatatttctgtatgtgagattttagcttggtctagctcccccaatggagtataccagtattgattcagatgagaatatgagcatcctgccagtagctttttcagtgtcattgatagtaagacctacaacacagcaatttttggaggatagaagagaatatatataagggctttgcaaactgggaagcaggcactccataaatgggaggtatcattatgacattctctttgcacatatcattttcatttcactgaaccagagtactagttattttaaaacataatctaatgtatatgctcaaggtagtaagtggggattttaaaagcaagtgattagttggcttataaaatattatttttcaattgtctattaatgtacattggaaagaaggcttttaaagatctaaaatcaacataaataagcttcccctttcatttgccagactctttccctatcagatttctgatctaaattcttaataagaagagaagctggtgaatttagtttctttccttttcctggcctgtcctctaggggaagctttagtaagaaacaacattccaaaatcaggcagtgagcgagagagaaggcaagggactggatgaccacaaaatagataatcagccaagaaacagaaatgagggaaaaccagcattaaagcatgacttacaaagggtttttattttgtaattctgtaattttgggaccaggctcaaacttgctcaagtaacattcactcgatcatattgcttacaatctgtcagttaaaatgatgtctaactgagcatattttttattaaatatacttctctcaaaggccagtaaagctactctttggttttaattagacaaactagtctaaccacttaaataactctaatgaatatgaactgatatcatcagatttaaaagctctgctgaaaactaaatttattctgaaaagcactgacttgccagaaaaatatctatttttgcagctttcttttcactctatggataatttaatgagttgcttattttaattttacaactgctacctcagaagtatctcaaattatctttctttggctggtgtctttctctgctgatctgctactgctgtgtgtgtgtgtgtgtgtgtgtgtgtgtctgtgtgtgtgtgtgtatgggcgtgtgtgtctctgtgtgtgttttctagtgggaatttaacaagcagtgagtctcttaaatttacatgccataatctatgtcaagaacattgcgtactacttagcaataaaaataaacattagcatctagtgaaagcttaccatcattgagtgctatggaaatagaggtcttaaagaaagattaaatttttcaacaaaaaaatttttcccctttttggcttaaaggtgattataatttcaaaaatatgacatctttcctcttttactttggaatgtagagctgctgctttaacaagtgtcttttgagaaagatacacgtgtttcataaagattaatacccttaaaacactatggtgcagagagggaaggatgaattctttaaccctgcctctaatctcatttggcaatttttggagtattcattctgactttttaaaaattcaggtggattttttttctgctttctttccaacattataaaacaatcctataagagatttttctgctatagtgcagactttatttgtatttcctagtaataacactttagattcatatagtactttgacagctctctataggtttcatttgatttccttatcagtcatgtaaggtaggaatcaccaatcaccttttacagatgaggaaagtaaggtgcagaattatctaacactacactgccagtaagatgtaaagactaactcagagtctttcttcaaattttaaggaaatttgtgtttgttcctctctaga

SEQ ID NO: 980 - DNA, 4046 bp, Homo sapiens
tgcgcttttctggtattattattaaagcggtagtctgccggcgctgataagcaacaagttccccagcggtcttcccgccctagcctgacaaggcgaaggttttcttacctggcgacagggaaatctcccgagccgaattcagcttcgccggagccccaggtgtgacctgcgtagtgggcaagggagcggtgtgcaggctgagtttttttttttacaggggtaccctgaaactcctcactttctctgggaactttcagtgccaggacccagtaacgggcggttagaaggcagccctaggaaacacctgctacatagcagggcagttgggcaatcattggtaacctcgctcattcattagaatcacgtaagaactcaaaaggaaacgtgtctctcggagtgagggcgtttgcgtaaatctataggtttttcgacatcgatgccagttgctttgtcttctgtagtcgccaaggtggttgagagtttaagcttgcggatattgcaaagggttattagattcataagtcacaccaagtggtgggcgatccactgagcaaagccgaacttctcacatgatgacttcaaacaagacacattaccttccagcatctgttggggagacgagattttaagacacttgagtctccaggacagcaaaggcacaatggtgagtagcaataaaacctgcattataattgaaaaatcttgacatgttgcttaacaacgggcatatcacggctcttcctagcacttcacacgccaaagaacagcagctactcaggccaggggaatcgggtttttacacagtgcaactttaattggaatcatttgagatttgacacagctatgtggaactgcgtggaacaaacttggagctgggtgggggggtgtgtgttatattggttgttcaaggctgatgcttgtctctcagcagtcttgcattctattcttttccttaatgtgtatggtgtatgatcatattctatgatttatatgtgggcatgtaattgacatttgcaagggggttaatttccatctaaaaacaataatgctgttagaggttggggttagggggtggagtgggggtaagggtggggtaaagactgggagtttaggtgtagatggggggtggggttggggggagagaaataagtcagaagtgcatatcaccggtaatgggtaatcctctcgtagaagaaaaggttctcatcaacatgtgatcaactattaacaggatggctttggcaaagccatccgcacgtgacaaaccgtaaggaagtggaagaaaccgtctagagcaatatcaagtatcacttaattagagatttttaagccttttcctcctgctgtgccgggtgtgtaatccgggcgataggagtccattcagcaccttggacagagccaacggatttgtccgaggtggcggtacccccaggtagtcttcttggccccgctgtaaagccaaccctgtgtcgcccttaaaaagcgtcttttctgaggttcggctcacactgagatcggggctggagagagagtcagattttggagcggagcgtttggaaagcgagccccagtttggtcccctcattgagctcgctgaagttggcttcctagcggtgtaggctggaatagactcttggcaagctccgggttggtatactgggttaactttgggaaatgcaagtgtttatctccaggatctagccaccggggtggtgtaagccgcaaagaaggtaagcaccagggcggggaccccttgcatccccaattcttgagctattttgatactgtcttccggagaggacgcgtggtggaggggaggaggtagagggagagcatgagagggggttgtttcttggtatttgcccagtttgaattgccctaggtgagaaccctggggcaaagggagaaagaaaaaaaagaaactcagtcttcctgcggatataatgagtttagttaacttggacctgcaaatgtctgattcaaatgtaagatttatctctctttttctcctcttcacctccctcttttccgttctctttgctggtgtgtgtgtgtgtgtgtacagtagattcattactaattatgaagcttttgcaaaacattcgaattcctaaaatttgactttgtagcatttagaatcaggcggtggaggtggtgtgcggtggggagaggaggtggaggttgggaagagggaaggaggtaaagctaaacctccaacacaaaaaaatgaatcaaggtaatttcagctcttctagtgagaaggattcattctctctgtatccctccctccctctctttccccctccctccctccttcccgccccccttcttccaccccgccccctcctccagcctccatccctccctcattctatctcttcctctccgtcgccctcgctcctcgctggatgcttctttctgggttttcttttttttttcccttctgtcctccctccccgcgagtttcgggcgctggcttagagggttcccgctttctcaagggaaggggagctgccgagaccgcgctccgctccccagccgggccggatgcctcactgagcccaggtccgagtcagtcggggtaactcagggaaaggggagcctccgcctgggagtagaaggtcctttccggaccgaagagccagagagcgggccgggcgagggggcctgggcggctggaggcggtggagaagaacacttttagctccgtgcggcggctggacagagccaccaatcagctggacgcgcagaccgccctgccagggcgaggttgcgtccggaggcgccggtggagggcggccggctagtcgctgagccgccgccgccacccgggtgggcaggggactggcggtgggtggaggtgaggggcttggcgggtgagatagaagcggcgcggagccgcccagacctgtgttctacctctcccgcccccgcctgcacccccgggggacagcgaactgccggaacgcgcggctgcgttatcctcttgccactcttcagggagctcagggacttaggcgcccctgggcgggggccaccaggctctccacactcctataaccctcacccccacccccttctcaggccttttgttccggccacagagccaagcccggtggcagttttcgccccagggtttggtcgttctggactcctcccccgatcagctcttcttaattaaaaggcaagagcttggggtaggggtgaggggaacgtaggaaaaatctgtttccgaaactcaagaccactgttttaacgaacgaaagaaagaatcccaactctgcgcaggtggattcataggcgaagcgaggatattgtggaaattcagaaggaaaagataaaaaacaggcgctaggatcagatgacggtgataggctgctcggcacacaaagggagcgtagggcagggtttacggagcaagcctgcagcgaatggggcacagattgttccgagatccagtcgttttctcagtcagatctacgcgaagggaggggaggggaggggcgggcaggggagcgtggcgggaggggctgagcttgggggcggggggatttctgatcagtctgatgcaattccaagcgtgctgcaaaggaactccaaggcgcccgcatcaccatcgccacccacccttcccagatggtgctgttttaaatacggatctgcagggctgaacgcagaactgggagatttattgcaaaatcccgggaggggcgggggggggtggtgtgcggaacggggaatggaggagcagaatttaaaggtgcaacgcttgctttttccaatcaggcggcaaccggccggaattattatttttttctttctgtctgcttgtctctggattctaattcaccaagaaagaggtgtaaatattgtgacattttgaggcagcttgatggatgggaaagaaatcatctgtcactctaaattgcagagttccctctccccgcgccatcccttgctagcgaatactcgctgctgcctaatacagttgctagggcttcaaatgaatgcatcgttaagggaatattatccttttagttgacttg

SEQ ID NO: 981 - DNA, 4045 bp, Homo sapiens
tcgagttattgcctatttcccgagatttccggagtcgtccccacatctcccgcggagagcggcgcccctccgccccccctcccgcctccccctctattagacactccaagggggtagtttgtttcattgtgctttttttcctcttctcaaagttcatcctttcgcctccaagttactttccgccaacacgtgacctcttcgcttcccagcttgcgcagccactggtggggaagcgcgggcgctaaccgcagggcttcctgggagagccccctccgaggttcgccaccccagccctggctcccgccgcgctcaccccggcaccccggcggcggggcagcccccgcaggatgaggaagcggctccggggaagcagcaccgagcagcagcggagcgcccaacctgccgcctcccctcccgtccctgccttggcccgcggctccgctctccgcggctcgccttccgacctagctgcgcaccggggctgttaactcacatttgggaagccataacccattagagcaaacgcagtcataacttcattcaactcagccgctcgagagctcggcttacacaggttcctgtgggcaactagtggctcgccttggtgcctctcgcctagtcatcagtacctaagaggaaaagggaaagttgttgggctggttcgcgcttcgacgcatgcagatgttcccaaggacaagtcacttactcgcccccctccccccagtccccatttgatcatcactcacgacctcatcggctggagacccttagtcatgatgggggagggggaggggcacgaacttttctaagaagtttcctttttttacccagagagtcacagtgagtcggtcacgtaaacagcgaggttagtcgtcgccgttgccgccccccaccccctccctgctgcgcttttctggtattattattaaagcggtagtctgccggcgctgataagcaacaagttccccagcggtcttcccgccctagcctgacaaggcgaaggttttcttacctggcgacagggaaatctcccgagccgaattcagcttcgccggagccccaggtgtgacctgcgtagtgggcaagggagcggtgtgcaggctgagtttttttttttacaggggtaccctgaaactcctcactttctctgggaactttcagtgccaggacccagtaacgggcggttagaaggcagccctaggaaacacctgctacatagcagggcagttgggcaatcattggtaacctcgctcattcattagaatcacgtaagaactcaaaaggaaacgtgtctctcggagtgagggcgtttgcgtaaatctataggtttttcgacatcgatgccagttgctttgtcttctgtagtcgccaaggtggttgagagtttaagcttgcggatattgcaaagggttattagattcataagtcacaccaagtggtgggcgatccactgagcaaagccgaacttctcacatgatgacttcaaacaagacacattaccttccagcatctgttggggagacgagattttaagacacttgagtctccaggacagcaaaggcacaatggtgagtagcaataaaacctgcattataattgaaaaatcttgacatgttgcttaacaacgggcatatcacggctcttcctagcacttcacacgccaaagaacagcagctactcaggccaggggaatcgggtttttacacagtgcaactttaattggaatcatttgagatttgacacagctatgtggaactgcgtggaacaaacttggagctgggtgggggggtgtgtgttatattggttgttcaaggctgatgcttgtctctcagcagtcttgcattctattcttttccttaatgtgtatggtgtatgatcatattctatgatttatatgtgggcatgtaattgacatttgcaagggggttaatttccatctaaaaacaataatgctgttagaggttggggttagggggtggagtgggggtaagggtggggtaaagactgggagtttaggtgtagatggggggtggggttggggggagagaaataagtcagaagtgcatatcaccggtaatgggtaatcctctcgtagaagaaaaggttctcatcaacatgtgatcaactattaacaggatggctttggcaaagccatccgcacgtgacaaaccgtaaggaagtggaagaaaccgtctagagcaatatcaagtatcacttaattagagatttttaagccttttcctcctgctgtgccgggtgtgtaatccgggcgataggagtccattcagcaccttggacagagccaacggatttgtccgaggtggcggtacccccaggtagtcttcttggccccgctgtaaagccaaccctgtgtcgcccttaaaaagcgtcttttctgaggttcggctcacactgagatcggggctggagagagagtcagattttggagcggagcgtttggaaagcgagccccagtttggtcccctcattgagctcgctgaagttggcttcctagcggtgtaggctggaatagactcttggcaagctccgggttggtatactgggttaactttgggaaatgcaagtgtttatctccaggatctagccaccggggtggtgtaagccgcaaagaaggtaagcaccagggcggggaccccttgcatccccaattcttgagctattttgatactgtcttccggagaggacgcgtggtggaggggaggaggtagagggagagcatgagagggggttgtttcttggtatttgcccagtttgaattgccctaggtgagaaccctggggcaaagggagaaagaaaaaaaagaaactcagtcttcctgcggatataatgagtttagttaacttggacctgcaaatgtctgattcaaatgtaagatttatctctctttttctcctcttcacctccctcttttccgttctctttgctggtgtgtgtgtgtgtgtgtacagtagattcattactaattatgaagcttttgcaaaacattcgaattcctaaaatttgactttgtagcatttagaatcaggcggtggaggtggtgtgcggtggggagaggaggtggaggttgggaagagggaaggaggtaaagctaaacctccaacacaaaaaaatgaatcaaggtaatttcagctcttctagtgagaaggattcattctctctgtatccctccctccctctctttccccctccctccctccttcccgccccccttcttccaccccgccccctcctccagcctccatccctccctcattctatctcttcctctccgtcgccctcgctcctcgctggatgcttctttctgggttttcttttttttttcccttctgtcctccctccccgcgagtttcgggcgctggcttagagggttcccgctttctcaagggaaggggagctgccgagaccgcgctccgctccccagccgggccggatgcctcactgagcccaggtccgagtcagtcggggtaactcagggaaaggggagcctccgcctgggagtagaaggtcctttccggaccgaagagccagagagcgggccgggcgagggggcctgggcggctggaggcggtggagaagaacacttttagctccgtgcggcggctggacagagccaccaatcagctggacgcgcagaccgccctgccagggcgaggttgcgtccggaggcgccggtggagggcggccggctagtcgctgagccgccgccgccacccgggtgggcaggggactggcggtgggtggaggtgaggggcttggcgggtgagatagaagcggcgcggagccgcccagacctgtgttctacctctcccgcccccgcctgcacccccgggggacagcgaactgccggaacgcgcggctgcgttatcctcttgccactcttcagggagctcagggacttaggcgcccctgggcgggggccaccaggctctccacactcctataaccctcacccccacccccttctcaggccttttgttccggccacagagccaagcccggtggcagttttcgccccagggtttgg

SEQ ID NO: 982 - DNA, 4050 bp, Homo sapiens
gggtaggcaaagggcagcttcagtggaaagataccttgcgttagcgcctccctaggctgggggacgttgccaaagctcgagttattgcctatttcccgagatttccggagtcgtccccacatctcccgcggagagcggcgcccctccgccccccctcccgcctccccctctattagacactccaagggggtagtttgtttcattgtgctttttttcctcttctcaaagttcatcctttcgcctccaagttactttccgccaacacgtgacctcttcgcttcccagcttgcgcagccactggtggggaagcgcgggcgctaaccgcagggcttcctgggagagccccctccgaggttcgccaccccagccctggctcccgccgcgctcaccccggcaccccggcggcggggcagcccccgcaggatgaggaagcggctccggggaagcagcaccgagcagcagcggagcgcccaacctgccgcctcccctcccgtccctgccttggcccgcggctccgctctccgcggctcgccttccgacctagctgcgcaccggggctgttaactcacatttgggaagccataacccattagagcaaacgcagtcataacttcattcaactcagccgctcgagagctcggcttacacaggttcctgtgggcaactagtggctcgccttggtgcctctcgcctagtcatcagtacctaagaggaaaagggaaagttgttgggctggttcgcgcttcgacgcatgcagatgttcccaaggacaagtcacttactcgcccccctccccccagtccccatttgatcatcactcacgacctcatcggctggagacccttagtcatgatgggggagggggaggggcacgaacttttctaagaagtttcctttttttacccagagagtcacagtgagtcggtcacgtaaacagcgaggttagtcgtcgccgttgccgccccccaccccctccctgctgcgcttttctggtattattattaaagcggtagtctgccggcgctgataagcaacaagttccccagcggtcttcccgccctagcctgacaaggcgaaggttttcttacctggcgacagggaaatctcccgagccgaattcagcttcgccggagccccaggtgtgacctgcgtagtgggcaagggagcggtgtgcaggctgagtttttttttttacaggggtaccctgaaactcctcactttctctgggaactttcagtgccaggacccagtaacgggcggttagaaggcagccctaggaaacacctgctacatagcagggcagttgggcaatcattggtaacctcgctcattcattagaatcacgtaagaactcaaaaggaaacgtgtctctcggagtgagggcgtttgcgtaaatctataggtttttcgacatcgatgccagttgctttgtcttctgtagtcgccaaggtggttgagagtttaagcttgcggatattgcaaagggttattagattcataagtcacaccaagtggtgggcgatccactgagcaaagccgaacttctcacatgatgacttcaaacaagacacattaccttccagcatctgttggggagacgagattttaagacacttgagtctccaggacagcaaaggcacaatggtgagtagcaataaaacctgcattataattgaaaaatcttgacatgttgcttaacaacgggcatatcacggctcttcctagcacttcacacgccaaagaacagcagctactcaggccaggggaatcgggtttttacacagtgcaactttaattggaatcatttgagatttgacacagctatgtggaactgcgtggaacaaacttggagctgggtgggggggtgtgtgttatattggttgttcaaggctgatgcttgtctctcagcagtcttgcattctattcttttccttaatgtgtatggtgtatgatcatattctatgatttatatgtgggcatgtaattgacatttgcaagggggttaatttccatctaaaaacaataatgctgttagaggttggggttagggggtggagtgggggtaagggtggggtaaagactgggagtttaggtgtagatggggggtggggttggggggagagaaataagtcagaagtgcatatcaccggtaatgggtaatcctctcgtagaagaaaaggttctcatcaacatgtgatcaactattaacaggatggctttggcaaagccatccgcacgtgacaaaccgtaaggaagtggaagaaaccgtctagagcaatatcaagtatcacttaattagagatttttaagccttttcctcctgctgtgccgggtgtgtaatccgggcgataggagtccattcagcaccttggacagagccaacggatttgtccgaggtggcggtacccccaggtagtcttcttggccccgctgtaaagccaaccctgtgtcgcccttaaaaagcgtcttttctgaggttcggctcacactgagatcggggctggagagagagtcagattttggagcggagcgtttggaaagcgagccccagtttggtcccctcattgagctcgctgaagttggcttcctagcggtgtaggctggaatagactcttggcaagctccgggttggtatactgggttaactttgggaaatgcaagtgtttatctccaggatctagccaccggggtggtgtaagccgcaaagaaggtaagcaccagggcggggaccccttgcatccccaattcttgagctattttgatactgtcttccggagaggacgcgtggtggaggggaggaggtagagggagagcatgagagggggttgtttcttggtatttgcccagtttgaattgccctaggtgagaaccctggggcaaagggagaaagaaaaaaaagaaactcagtcttcctgcggatataatgagtttagttaacttggacctgcaaatgtctgattcaaatgtaagatttatctctctttttctcctcttcacctccctcttttccgttctctttgctggtgtgtgtgtgtgtgtgtacagtagattcattactaattatgaagcttttgcaaaacattcgaattcctaaaatttgactttgtagcatttagaatcaggcggtggaggtggtgtgcggtggggagaggaggtggaggttgggaagagggaaggaggtaaagctaaacctccaacacaaaaaaatgaatcaaggtaatttcagctcttctagtgagaaggattcattctctctgtatccctccctccctctctttccccctccctccctccttcccgccccccttcttccaccccgccccctcctccagcctccatccctccctcattctatctcttcctctccgtcgccctcgctcctcgctggatgcttctttctgggttttcttttttttttcccttctgtcctccctccccgcgagtttcgggcgctggcttagagggttcccgctttctcaagggaaggggagctgccgagaccgcgctccgctccccagccgggccggatgcctcactgagcccaggtccgagtcagtcggggtaactcagggaaaggggagcctccgcctgggagtagaaggtcctttccggaccgaagagccagagagcgggccgggcgagggggcctgggcggctggaggcggtggagaagaacacttttagctccgtgcggcggctggacagagccaccaatcagctggacgcgcagaccgccctgccagggcgaggttgcgtccggaggcgccggtggagggcggccggctagtcgctgagccgccgccgccacccgggtgggcaggggactggcggtgggtggaggtgaggggcttggcgggtgagatagaagcggcgcggagccgcccagacctgtgttctacctctcccgcccccgcctgcacccccgggggacagcgaactgccggaacgcgcggctgcgttatcctcttgccactcttcagggagctcagggacttaggcgcccctgggcgggggccaccaggctctccacactcctataaccctcacccc

SEQ ID NO: 983 - DNA, 47 bp, Homo sapiens
aattttcaaaattaattgatgttttaaaaatgttgagaccaaagtag

SEQ ID NO: 984 - DNA, 43 bp, Homo sapiens
ctatataaaaaagtgggcattttgtaacattccttcaggaaga

SEQ ID NO: 985 - DNA, 52 bp, Homo sapiens
gttacaacttacaggaacatttgtactttaagaaaaatttaagtgacaaatg

SEQ ID NO: 986 - DNA, 48 bp, Homo sapiens
atattttagtccttccattcctagagacaaaccagttatttggtggtg

SEQ ID NO: 987 - DNA, 49 bp, Homo sapiens
taaacagaatatgatgtaagagaggatttcatatagattaaaatggtaa

SEQ ID NO: 988 - DNA, 83 bp, Homo sapiens
aatctatatatcccgaataattccaggtggaattgctgatagacatgggggcctcaaacgtggagatcaactcctctctgtta

SEQ ID NO: 989 - DNA, 31 bp, Homo sapiens
actgttgctgcatttgctgccagtgaaggac

SEQ ID NO: 990 - DNA, 47 bp, Homo sapiens
ctttgcaaagagtccttcaaagtgaattctgcaatgctgtgagagag

SEQ ID NO: 991 - DNA, 46 bp, Homo sapiens
agatatttgtagagcaattgaattattggaaaaactacaaaggagt

SEQ ID NO: 992 - DNA, 4047 bp, Homo sapiens
ggaacttaaaagccagcttttagactataaacagaatatgatgtaagagaggatttcatatagattaaaatggtaaggcaggattatttcttagttttgtaatgttggaataatataacattaaaacttttcttcattatatatattgtaaacatttttgcattttgagttactttcaaaacttagatattagtgtatggttggttgtttttttttcccctagagtgttgaaggagaacatcatgaaaaagctgtagaactgctgaaagccgcacaaggaaaggttaaattagtggtacgatacacacccaaagtcttagaagaaatggagtcgcgctttgaaaaaatgagatcagcaaaacgcaggcaacagacctaatacatttcaaaacttgatatttcattttgcgttttagctagagaagttttccttgtgacttactaatggctgcaatgccaatgattgtaagaaaacaaacaaatttatcatgaaattctccttgtcattttataaatgcctattttaacatcatttatggttccagagatgcatacacttttttctgacaagaaaaagtaaaaggtgatgagggcaattctgtcctactgtttttacaggcctttttcaaatgcagattttgtcataaagttgttatagattttttaaaatgcttttttaatattaaaatgtacttttacattcttaatctttttttagaaaggaaaagttttcttcatttagctgctgatttaaaagtaaagttctccaattctttttttttgcttactctattttttttaacctgtgaaatttctttacagttttccaagaaattaagcataacagtctcatctacggcagttcattacactgtcaatgttaacatcattgctgcattttgtactttgaacacacacataatatatataaccagtggtaaatcatgactcagtacagtgcaagttttttcacttttacttaaacataatatataatggatattcatttatactgatttatgaaagtaagtttttaaacactgaaacaatcattgctaaaatacatattcttaatatttgagcattgaggcaagaggatgtaattgatagcattacttattacatccctatttatgttcaaccgtacatcaaattataaatgcaaaacaggttcagatttcatcttttgtgatttcttttaaatactattcatttttatttaaatgcacagtatttcccctatattttagtccttccattcctagagacaaaccagttatttggtggtgggaagtagctgaagcaaagaaggaaaagtaatacctttaacctcactagcttcaagagtagacattcttactagctcaatttaaataattgattttaaataggaagaaaagaggatatatttaagatacatagaaattatgatgtgaagtattcatgagaatctgtagattccatcaaaataagtaggaactcatactaaaattgttggatttaaagaggcaacttttgtttatgattcaaatatgggaatttgagaaatatttcatttgtccactggatgtcactattttactaaaaggcagctattagtgtgggactgtgactgaggtcttaaagactgaaagagttggggttcattttctgttacaacttacaggaacatttgtactttaagaaaaatttaagtgacaaatgttagaagatgatggattgaaaaatataagtaatttggcatattgaccctatataaaaaagtgggcattttgtaacattccttcaggaagaatagaattgtatgcttttttctgcatgtttgtgatcactgtgagtctcagatgattattccagttttcaatgatttttcaaaataaaagtcaatcagcattgttatttatcattaaggtattgaacactggattgcatggttgaatgtgtctttaatccactacaaaatgtgcttgttattgataggatcatgttgttaaattgtaaattttcaaaattaattgatgttttaaaaatgttgagaccaaagtagtatagaagtatggacttaatttaattgtaaaattattagaggtatttgttgtagagctttatatattaaagagaggtattggtgcatataaaaacagtaatattattgttatgcttgtattcttgcatttcagggtaagtaaaccctgaagaaatcttattttagtatagctacagctgcagtagcttttaagtatgtatcaacatttcattataaattatagcttcctggttctgtgtctcagctgtttcagaactttcagccaagttaaatcttttttggtgttgaaacttttagtaagttgagtaagctatttttttccctacggtaatccacaatctgttctttgtgtgggttgacacctatttataattcttaaaataagggtagctcaaaggagccaagtacagtagtttagcttgctactgttgagcatgaatagcagtaggttgttttcattaatgcagttttcataatgtatcccagaattttaaatcttgaccatagaaaaatacagtcattcattggcaaagatgtacagtggtggtttagtgcagtgaggaaatgatgggaatttttatcttagaaatggatgattcgtgaataaaactaggtacatagtaagtgtatgatagatgtttgatttgtaaattacaaatataaattatcacccccatttccatttattttcttgatatatcaaaatgtgttgacttagtgattctcaatcttagctacatattagcctggcagagctttaaaaaattgatacctgggtcctattccataacaactaaatcaaaatcacccttttttttttttttgtaaagctttccaggtggttctaaaggacacctagggtcaataacccattataaaatgatctgattacactggacactcttaggaagtatcaaaatagaacagttcaatttgcagctacttaatgattaattacatttcttaggttttttttttgttttttttttggtttgtttgttttttgttttaaaagagacaggatcttgctttgtctcccaggctggaacacagtggtgtgatcatagctcactgcagcctgaaactccttggcttccacctcagcctcccaaagcattaggattataggcgtgagccactgcacctggccaagtaatttcttttaggaataaaaggtacttggcattccttatttgggaagtaattacagtcttatctttttttttcttttttcttttttttaataaaatctaccagtaatttaaatgtgagctttttatgtctgtcatcattctgccccctttgcctttaaaacttacaaaaatacgtgtttgttatttgagaaagcatgtttaaaaattgcagatgagaaatattgtcgttaataattatgtactgtcttaatgtgggcacttcatttgttagtataatactagataatagcagcctagttctttaggatttgacgattcaaattttttttttgttttttgtttttgtttttttttgagacagagtcttgctctgttgcccaggctggcgtgcagtggtgtgatctcggctcacttcagcctccgccacctcaaggcagttcaagcaattctcctgcctcagcctcccgagtagctaggactacaggcgtgtgccacctctcccggctaatttttttgtatttttagtagagacggggtttcaccgtgttagccaggatgatctcgatctcctgacctcgtgattcgcccgcctcggcctcccaaagtgctggaattactggcgtgagccaccatgcccagcctcaaatatgtttttaaaaaatatcattgtcctcctcctcttaagatttttttaagttattttgctcaagtacttaagtagtctggctcaagtactttgtttacaattaaaatggatattatagcatttaatagaagaaatggttatggcttatccaaaaagaatgtcagcatgacctggtgtagacttaaaaaactacatgtttg

SEQ ID NO: 993 - DNA, 4043 bp, Homo sapiens
aacttgtggtttagaaatgccttgagggaatcctaggcagtactattaatacagtgatccttttttttaagcactataagtgtattttgcagtgtaaattagcagtgcttaatgtcatttttatgacataagctctttattaaaggcaatacattaaattagaagtctaccctcattttactcttataaaatgccaattgcttgatctactgaaataataaggcatatagattaatatgctaattatttggaacttaaaagccagcttttagactataaacagaatatgatgtaagagaggatttcatatagattaaaatggtaaggcaggattatttcttagttttgtaatgttggaataatataacattaaaacttttcttcattatatatattgtaaacatttttgcattttgagttactttcaaaacttagatattagtgtatggttggttgtttttttttcccctagagtgttgaaggagaacatcatgaaaaagctgtagaactgctgaaagccgcacaaggaaaggttaaattagtggtacgatacacacccaaagtcttagaagaaatggagtcgcgctttgaaaaaatgagatcagcaaaacgcaggcaacagacctaatacatttcaaaacttgatatttcattttgcgttttagctagagaagttttccttgtgacttactaatggctgcaatgccaatgattgtaagaaaacaaacaaatttatcatgaaattctccttgtcattttataaatgcctattttaacatcatttatggttccagagatgcatacacttttttctgacaagaaaaagtaaaaggtgatgagggcaattctgtcctactgtttttacaggcctttttcaaatgcagattttgtcataaagttgttatagattttttaaaatgcttttttaatattaaaatgtacttttacattcttaatctttttttagaaaggaaaagttttcttcatttagctgctgatttaaaagtaaagttctccaattctttttttttgcttactctattttttttaacctgtgaaatttctttacagttttccaagaaattaagcataacagtctcatctacggcagttcattacactgtcaatgttaacatcattgctgcattttgtactttgaacacacacataatatatataaccagtggtaaatcatgactcagtacagtgcaagttttttcacttttacttaaacataatatataatggatattcatttatactgatttatgaaagtaagtttttaaacactgaaacaatcattgctaaaatacatattcttaatatttgagcattgaggcaagaggatgtaattgatagcattacttattacatccctatttatgttcaaccgtacatcaaattataaatgcaaaacaggttcagatttcatcttttgtgatttcttttaaatactattcatttttatttaaatgcacagtatttcccctatattttagtccttccattcctagagacaaaccagttatttggtggtgggaagtagctgaagcaaagaaggaaaagtaatacctttaacctcactagcttcaagagtagacattcttactagctcaatttaaataattgattttaaataggaagaaaagaggatatatttaagatacatagaaattatgatgtgaagtattcatgagaatctgtagattccatcaaaataagtaggaactcatactaaaattgttggatttaaagaggcaacttttgtttatgattcaaatatgggaatttgagaaatatttcatttgtccactggatgtcactattttactaaaaggcagctattagtgtgggactgtgactgaggtcttaaagactgaaagagttggggttcattttctgttacaacttacaggaacatttgtactttaagaaaaatttaagtgacaaatgttagaagatgatggattgaaaaatataagtaatttggcatattgaccctatataaaaaagtgggcattttgtaacattccttcaggaagaatagaattgtatgcttttttctgcatgtttgtgatcactgtgagtctcagatgattattccagttttcaatgatttttcaaaataaaagtcaatcagcattgttatttatcattaaggtattgaacactggattgcatggttgaatgtgtctttaatccactacaaaatgtgcttgttattgataggatcatgttgttaaattgtaaattttcaaaattaattgatgttttaaaaatgttgagaccaaagtagtatagaagtatggacttaatttaattgtaaaattattagaggtatttgttgtagagctttatatattaaagagaggtattggtgcatataaaaacagtaatattattgttatgcttgtattcttgcatttcagggtaagtaaaccctgaagaaatcttattttagtatagctacagctgcagtagcttttaagtatgtatcaacatttcattataaattatagcttcctggttctgtgtctcagctgtttcagaactttcagccaagttaaatcttttttggtgttgaaacttttagtaagttgagtaagctatttttttccctacggtaatccacaatctgttctttgtgtgggttgacacctatttataattcttaaaataagggtagctcaaaggagccaagtacagtagtttagcttgctactgttgagcatgaatagcagtaggttgttttcattaatgcagttttcataatgtatcccagaattttaaatcttgaccatagaaaaatacagtcattcattggcaaagatgtacagtggtggtttagtgcagtgaggaaatgatgggaatttttatcttagaaatggatgattcgtgaataaaactaggtacatagtaagtgtatgatagatgtttgatttgtaaattacaaatataaattatcacccccatttccatttattttcttgatatatcaaaatgtgttgacttagtgattctcaatcttagctacatattagcctggcagagctttaaaaaattgatacctgggtcctattccataacaactaaatcaaaatcacccttttttttttttttgtaaagctttccaggtggttctaaaggacacctagggtcaataacccattataaaatgatctgattacactggacactcttaggaagtatcaaaatagaacagttcaatttgcagctacttaatgattaattacatttcttaggttttttttttgttttttttttggtttgtttgttttttgttttaaaagagacaggatcttgctttgtctcccaggctggaacacagtggtgtgatcatagctcactgcagcctgaaactccttggcttccacctcagcctcccaaagcattaggattataggcgtgagccactgcacctggccaagtaatttcttttaggaataaaaggtacttggcattccttatttgggaagtaattacagtcttatctttttttttcttttttcttttttttaataaaatctaccagtaatttaaatgtgagctttttatgtctgtcatcattctgccccctttgcctttaaaacttacaaaaatacgtgtttgttatttgagaaagcatgtttaaaaattgcagatgagaaatattgtcgttaataattatgtactgtcttaatgtgggcacttcatttgttagtataatactagataatagcagcctagttctttaggatttgacgattcaaattttttttttgttttttgtttttgtttttttttgagacagagtcttgctctgttgcccaggctggcgtgcagtggtgtgatctcggctcacttcagcctccgccacctcaaggcagttcaagcaattctcctgcctcagcctcccgagtagctaggactacaggcgtgtgccacctctcccggctaatttttttgtatttttagtagagacggggtttcaccgtgttagccaggatgatctcgatctcctgacctcgtgattcgcccgcctc

SEQ ID NO: 994 - DNA, 4052 bp, Homo sapiens
tctctgttaatggagtggtaaggatgaattttatttctatttgtagtgatctgttgtgaccacctgggggcgtatttgagtaataggagaaacctaagaaacttgtggtttagaaatgccttgagggaatcctaggcagtactattaatacagtgatccttttttttaagcactataagtgtattttgcagtgtaaattagcagtgcttaatgtcatttttatgacataagctctttattaaaggcaatacattaaattagaagtctaccctcattttactcttataaaatgccaattgcttgatctactgaaataataaggcatatagattaatatgctaattatttggaacttaaaagccagcttttagactataaacagaatatgatgtaagagaggatttcatatagattaaaatggtaaggcaggattatttcttagttttgtaatgttggaataatataacattaaaacttttcttcattatatatattgtaaacatttttgcattttgagttactttcaaaacttagatattagtgtatggttggttgtttttttttcccctagagtgttgaaggagaacatcatgaaaaagctgtagaactgctgaaagccgcacaaggaaaggttaaattagtggtacgatacacacccaaagtcttagaagaaatggagtcgcgctttgaaaaaatgagatcagcaaaacgcaggcaacagacctaatacatttcaaaacttgatatttcattttgcgttttagctagagaagttttccttgtgacttactaatggctgcaatgccaatgattgtaagaaaacaaacaaatttatcatgaaattctccttgtcattttataaatgcctattttaacatcatttatggttccagagatgcatacacttttttctgacaagaaaaagtaaaaggtgatgagggcaattctgtcctactgtttttacaggcctttttcaaatgcagattttgtcataaagttgttatagattttttaaaatgcttttttaatattaaaatgtacttttacattcttaatctttttttagaaaggaaaagttttcttcatttagctgctgatttaaaagtaaagttctccaattctttttttttgcttactctattttttttaacctgtgaaatttctttacagttttccaagaaattaagcataacagtctcatctacggcagttcattacactgtcaatgttaacatcattgctgcattttgtactttgaacacacacataatatatataaccagtggtaaatcatgactcagtacagtgcaagttttttcacttttacttaaacataatatataatggatattcatttatactgatttatgaaagtaagtttttaaacactgaaacaatcattgctaaaatacatattcttaatatttgagcattgaggcaagaggatgtaattgatagcattacttattacatccctatttatgttcaaccgtacatcaaattataaatgcaaaacaggttcagatttcatcttttgtgatttcttttaaatactattcatttttatttaaatgcacagtatttcccctatattttagtccttccattcctagagacaaaccagttatttggtggtgggaagtagctgaagcaaagaaggaaaagtaatacctttaacctcactagcttcaagagtagacattcttactagctcaatttaaataattgattttaaataggaagaaaagaggatatatttaagatacatagaaattatgatgtgaagtattcatgagaatctgtagattccatcaaaataagtaggaactcatactaaaattgttggatttaaagaggcaacttttgtttatgattcaaatatgggaatttgagaaatatttcatttgtccactggatgtcactattttactaaaaggcagctattagtgtgggactgtgactgaggtcttaaagactgaaagagttggggttcattttctgttacaacttacaggaacatttgtactttaagaaaaatttaagtgacaaatgttagaagatgatggattgaaaaatataagtaatttggcatattgaccctatataaaaaagtgggcattttgtaacattccttcaggaagaatagaattgtatgcttttttctgcatgtttgtgatcactgtgagtctcagatgattattccagttttcaatgatttttcaaaataaaagtcaatcagcattgttatttatcattaaggtattgaacactggattgcatggttgaatgtgtctttaatccactacaaaatgtgcttgttattgataggatcatgttgttaaattgtaaattttcaaaattaattgatgttttaaaaatgttgagaccaaagtagtatagaagtatggacttaatttaattgtaaaattattagaggtatttgttgtagagctttatatattaaagagaggtattggtgcatataaaaacagtaatattattgttatgcttgtattcttgcatttcagggtaagtaaaccctgaagaaatcttattttagtatagctacagctgcagtagcttttaagtatgtatcaacatttcattataaattatagcttcctggttctgtgtctcagctgtttcagaactttcagccaagttaaatcttttttggtgttgaaacttttagtaagttgagtaagctatttttttccctacggtaatccacaatctgttctttgtgtgggttgacacctatttataattcttaaaataagggtagctcaaaggagccaagtacagtagtttagcttgctactgttgagcatgaatagcagtaggttgttttcattaatgcagttttcataatgtatcccagaattttaaatcttgaccatagaaaaatacagtcattcattggcaaagatgtacagtggtggtttagtgcagtgaggaaatgatgggaatttttatcttagaaatggatgattcgtgaataaaactaggtacatagtaagtgtatgatagatgtttgatttgtaaattacaaatataaattatcacccccatttccatttattttcttgatatatcaaaatgtgttgacttagtgattctcaatcttagctacatattagcctggcagagctttaaaaaattgatacctgggtcctattccataacaactaaatcaaaatcacccttttttttttttttgtaaagctttccaggtggttctaaaggacacctagggtcaataacccattataaaatgatctgattacactggacactcttaggaagtatcaaaatagaacagttcaatttgcagctacttaatgattaattacatttcttaggttttttttttgttttttttttggtttgtttgttttttgttttaaaagagacaggatcttgctttgtctcccaggctggaacacagtggtgtgatcatagctcactgcagcctgaaactccttggcttccacctcagcctcccaaagcattaggattataggcgtgagccactgcacctggccaagtaatttcttttaggaataaaaggtacttggcattccttatttgggaagtaattacagtcttatctttttttttcttttttcttttttttaataaaatctaccagtaatttaaatgtgagctttttatgtctgtcatcattctgccccctttgcctttaaaacttacaaaaatacgtgtttgttatttgagaaagcatgtttaaaaattgcagatgagaaatattgtcgttaataattatgtactgtcttaatgtgggcacttcatttgttagtataatactagataatagcagcctagttctttaggatttgacgattcaaattttttttttgttttttgtttttgtttttttttgagacagagtcttgctctgttgcccaggctggcgtgcagtggtgtgatctcggctcacttcagcctccgccacctcaaggcagttcaagcaattctcctgcctcagcctcccgagtagctaggactacaggcgtgtgccacctctcccg

SEQ ID NO: 995 - DNA, 4048 bp, Homo sapiens
gccgggcgtggtggcaggcgcctgtagtctcagctactcaggaggctgaggcaggagaatggcgtgaagccaggaggtggagcttgcagtgagccaagatcacgccactgcactccagcctgtgcgacagagcgagactccatctcggggggaaacaaaagatgaaagaactgaagtaaataaaagtcatatttttaatatgtaaaactttctttcaggctactgttgctgcatttgctgccagtgaaggacattctcatcctcgagttgttgagctaccaaaaacagaagagggccttggattcaatattatgggaggcaaagaacaaaactctccaatctatatatcccgaataattccaggtggaattgctgatagacatgggggcctcaaacgtggagatcaactcctctctgttaatggagtggtaaggatgaattttatttctatttgtagtgatctgttgtgaccacctgggggcgtatttgagtaataggagaaacctaagaaacttgtggtttagaaatgccttgagggaatcctaggcagtactattaatacagtgatccttttttttaagcactataagtgtattttgcagtgtaaattagcagtgcttaatgtcatttttatgacataagctctttattaaaggcaatacattaaattagaagtctaccctcattttactcttataaaatgccaattgcttgatctactgaaataataaggcatatagattaatatgctaattatttggaacttaaaagccagcttttagactataaacagaatatgatgtaagagaggatttcatatagattaaaatggtaaggcaggattatttcttagttttgtaatgttggaataatataacattaaaacttttcttcattatatatattgtaaacatttttgcattttgagttactttcaaaacttagatattagtgtatggttggttgtttttttttcccctagagtgttgaaggagaacatcatgaaaaagctgtagaactgctgaaagccgcacaaggaaaggttaaattagtggtacgatacacacccaaagtcttagaagaaatggagtcgcgctttgaaaaaatgagatcagcaaaacgcaggcaacagacctaatacatttcaaaacttgatatttcattttgcgttttagctagagaagttttccttgtgacttactaatggctgcaatgccaatgattgtaagaaaacaaacaaatttatcatgaaattctccttgtcattttataaatgcctattttaacatcatttatggttccagagatgcatacacttttttctgacaagaaaaagtaaaaggtgatgagggcaattctgtcctactgtttttacaggcctttttcaaatgcagattttgtcataaagttgttatagattttttaaaatgcttttttaatattaaaatgtacttttacattcttaatctttttttagaaaggaaaagttttcttcatttagctgctgatttaaaagtaaagttctccaattctttttttttgcttactctattttttttaacctgtgaaatttctttacagttttccaagaaattaagcataacagtctcatctacggcagttcattacactgtcaatgttaacatcattgctgcattttgtactttgaacacacacataatatatataaccagtggtaaatcatgactcagtacagtgcaagttttttcacttttacttaaacataatatataatggatattcatttatactgatttatgaaagtaagtttttaaacactgaaacaatcattgctaaaatacatattcttaatatttgagcattgaggcaagaggatgtaattgatagcattacttattacatccctatttatgttcaaccgtacatcaaattataaatgcaaaacaggttcagatttcatcttttgtgatttcttttaaatactattcatttttatttaaatgcacagtatttcccctatattttagtccttccattcctagagacaaaccagttatttggtggtgggaagtagctgaagcaaagaaggaaaagtaatacctttaacctcactagcttcaagagtagacattcttactagctcaatttaaataattgattttaaataggaagaaaagaggatatatttaagatacatagaaattatgatgtgaagtattcatgagaatctgtagattccatcaaaataagtaggaactcatactaaaattgttggatttaaagaggcaacttttgtttatgattcaaatatgggaatttgagaaatatttcatttgtccactggatgtcactattttactaaaaggcagctattagtgtgggactgtgactgaggtcttaaagactgaaagagttggggttcattttctgttacaacttacaggaacatttgtactttaagaaaaatttaagtgacaaatgttagaagatgatggattgaaaaatataagtaatttggcatattgaccctatataaaaaagtgggcattttgtaacattccttcaggaagaatagaattgtatgcttttttctgcatgtttgtgatcactgtgagtctcagatgattattccagttttcaatgatttttcaaaataaaagtcaatcagcattgttatttatcattaaggtattgaacactggattgcatggttgaatgtgtctttaatccactacaaaatgtgcttgttattgataggatcatgttgttaaattgtaaattttcaaaattaattgatgttttaaaaatgttgagaccaaagtagtatagaagtatggacttaatttaattgtaaaattattagaggtatttgttgtagagctttatatattaaagagaggtattggtgcatataaaaacagtaatattattgttatgcttgtattcttgcatttcagggtaagtaaaccctgaagaaatcttattttagtatagctacagctgcagtagcttttaagtatgtatcaacatttcattataaattatagcttcctggttctgtgtctcagctgtttcagaactttcagccaagttaaatcttttttggtgttgaaacttttagtaagttgagtaagctatttttttccctacggtaatccacaatctgttctttgtgtgggttgacacctatttataattcttaaaataagggtagctcaaaggagccaagtacagtagtttagcttgctactgttgagcatgaatagcagtaggttgttttcattaatgcagttttcataatgtatcccagaattttaaatcttgaccatagaaaaatacagtcattcattggcaaagatgtacagtggtggtttagtgcagtgaggaaatgatgggaatttttatcttagaaatggatgattcgtgaataaaactaggtacatagtaagtgtatgatagatgtttgatttgtaaattacaaatataaattatcacccccatttccatttattttcttgatatatcaaaatgtgttgacttagtgattctcaatcttagctacatattagcctggcagagctttaaaaaattgatacctgggtcctattccataacaactaaatcaaaatcacccttttttttttttttgtaaagctttccaggtggttctaaaggacacctagggtcaataacccattataaaatgatctgattacactggacactcttaggaagtatcaaaatagaacagttcaatttgcagctacttaatgattaattacatttcttaggttttttttttgttttttttttggtttgtttgttttttgttttaaaagagacaggatcttgctttgtctcccaggctggaacacagtggtgtgatcatagctcactgcagcctgaaactccttggcttccacctcagcctcccaaagcattaggattataggcgtgagccactgcacctggccaagtaatttcttttaggaataaaaggtacttggcattccttatttgggaagtaattacagtcttatctttttttttcttttttctttttttt

SEQ ID NO: 996 - DNA, 4049 bp, Homo sapiens
ctcaaataatttaggtattgacctcactattcatgatagggggtttgaacagggtaatatcagcagtcggtgacttaaattaatcatcagcagatagttttttatggatagttactggctcacaaaaggaaatggtggattctttgttgaatacaaatacttaaacatgtggatatagtttatcagtgtagaaaagaccagagaaacatggttttaattgctgagttgtgtgagtttgatagcctactgaatttctgagccttaattccattatctgaaaaatgaggcctttttcagagcttcgaagataacgggtattcagtaaatcttgatttcttcaaagataacgggtgttcagtaaatcttgatttctttcctcctccccatttttgtgatccatcacaaaaaaatggtactagataattaccctttaaagcaaagtgaaacaaaatctcaactttataattagtttggattagtctaaagttgagctttaaagaagatacggctctgtttcatcttctgtggggatttttagttgtgtctagttaactaaagcaacaaaacattcagattggctatatgtacctctctttttctcaatattgagttatttcttgacatcttagatatttagtatatagtacaaatagtacagaagccaaaatgattacatataagggcaactccatgttgattatataggtaggttgtgtcctgcacaaaggctcctgaaggagttgggagatccagatctaaagcccagggctgctagcatgctggggaaggggttttcctccttaccatgtacaatatcagtctgcccagtaagtctgcttgccaagccctgcgcatacaggactgcacaaaagagtgggcactgaatgggctaggaatgacctaaaaaatcataacaaaaaatcgtaacatttcctgcataactcgaaattattcatttgtcgtctctaaaataccttctgtttagcttaccttctcagaatcaccagtgaatttgtgagcattcagacgtcaaaaatacgtgctcaaaagtagtttttaaaaagagacaaaagaggccaggcgcagtggctcacgcctgtaatcccagcactttgggaggccaaggcgggcggatcacgaggtcaggagatcgagaccatcctggctaatgtggtgaaaccccatctctactaaaaaaaaatacaaaaaaattagccgggcgtggtggcaggcgcctgtagtctcagctactcaggaggctgaggcaggagaatggcgtgaagccaggaggtggagcttgcagtgagccaagatcacgccactgcactccagcctgtgcgacagagcgagactccatctcggggggaaacaaaagatgaaagaactgaagtaaataaaagtcatatttttaatatgtaaaactttctttcaggctactgttgctgcatttgctgccagtgaaggacattctcatcctcgagttgttgagctaccaaaaacagaagagggccttggattcaatattatgggaggcaaagaacaaaactctccaatctatatatcccgaataattccaggtggaattgctgatagacatgggggcctcaaacgtggagatcaactcctctctgttaatggagtggtaaggatgaattttatttctatttgtagtgatctgttgtgaccacctgggggcgtatttgagtaataggagaaacctaagaaacttgtggtttagaaatgccttgagggaatcctaggcagtactattaatacagtgatccttttttttaagcactataagtgtattttgcagtgtaaattagcagtgcttaatgtcatttttatgacataagctctttattaaaggcaatacattaaattagaagtctaccctcattttactcttataaaatgccaattgcttgatctactgaaataataaggcatatagattaatatgctaattatttggaacttaaaagccagcttttagactataaacagaatatgatgtaagagaggatttcatatagattaaaatggtaaggcaggattatttcttagttttgtaatgttggaataatataacattaaaacttttcttcattatatatattgtaaacatttttgcattttgagttactttcaaaacttagatattagtgtatggttggttgtttttttttcccctagagtgttgaaggagaacatcatgaaaaagctgtagaactgctgaaagccgcacaaggaaaggttaaattagtggtacgatacacacccaaagtcttagaagaaatggagtcgcgctttgaaaaaatgagatcagcaaaacgcaggcaacagacctaatacatttcaaaacttgatatttcattttgcgttttagctagagaagttttccttgtgacttactaatggctgcaatgccaatgattgtaagaaaacaaacaaatttatcatgaaattctccttgtcattttataaatgcctattttaacatcatttatggttccagagatgcatacacttttttctgacaagaaaaagtaaaaggtgatgagggcaattctgtcctactgtttttacaggcctttttcaaatgcagattttgtcataaagttgttatagattttttaaaatgcttttttaatattaaaatgtacttttacattcttaatctttttttagaaaggaaaagttttcttcatttagctgctgatttaaaagtaaagttctccaattctttttttttgcttactctattttttttaacctgtgaaatttctttacagttttccaagaaattaagcataacagtctcatctacggcagttcattacactgtcaatgttaacatcattgctgcattttgtactttgaacacacacataatatatataaccagtggtaaatcatgactcagtacagtgcaagttttttcacttttacttaaacataatatataatggatattcatttatactgatttatgaaagtaagtttttaaacactgaaacaatcattgctaaaatacatattcttaatatttgagcattgaggcaagaggatgtaattgatagcattacttattacatccctatttatgttcaaccgtacatcaaattataaatgcaaaacaggttcagatttcatcttttgtgatttcttttaaatactattcatttttatttaaatgcacagtatttcccctatattttagtccttccattcctagagacaaaccagttatttggtggtgggaagtagctgaagcaaagaaggaaaagtaatacctttaacctcactagcttcaagagtagacattcttactagctcaatttaaataattgattttaaataggaagaaaagaggatatatttaagatacatagaaattatgatgtgaagtattcatgagaatctgtagattccatcaaaataagtaggaactcatactaaaattgttggatttaaagaggcaacttttgtttatgattcaaatatgggaatttgagaaatatttcatttgtccactggatgtcactattttactaaaaggcagctattagtgtgggactgtgactgaggtcttaaagactgaaagagttggggttcattttctgttacaacttacaggaacatttgtactttaagaaaaatttaagtgacaaatgttagaagatgatggattgaaaaatataagtaatttggcatattgaccctatataaaaaagtgggcattttgtaacattccttcaggaagaatagaattgtatgcttttttctgcatgtttgtgatcactgtgagtctcagatgattattccagttttcaatgatttttcaaaataaaagtcaatcagcattgttatttatcattaaggtattgaacactggattgcatggttgaatgtgtctttaatccactacaaaatgtgcttgttattgataggatcatgttgttaaattgtaaattttcaaaattaattgatgttttaaaaatgttgagaccaaagtagtatagaagtatggacttaatttaattgta

SEQ ID NO: 997 - DNA, 4083 bp, Homo sapiens
aagtttaaaatatggagttattaaattcataataaacttactttgaagactaacatgtatctttcaagctacaccaaatttctcaagtactaagaaataagacatttgtttctattgcctttacataaatgctgcatgataaatagcttacataagctattttatcatgcagtttagataatgcaatagaaatgtacttgcatacaatatgtatcatgcaatatataattgtgttgtatatgttatatatatgatactatataatattcattatacaaaatctaatcagaattttaagatatgaattactatcctcatcttattgatgaggaagcatgaggtgatttgccgcaaaccacacaaatagcatatgatagagctggggtacttccccgagttgatttttgctttcttctttacattatctgcatttctgtgccattgttttcctcaaataatttaggtattgacctcactattcatgatagggggtttgaacagggtaatatcagcagtcggtgacttaaattaatcatcagcagatagttttttatggatagttactggctcacaaaaggaaatggtggattctttgttgaatacaaatacttaaacatgtggatatagtttatcagtgtagaaaagaccagagaaacatggttttaattgctgagttgtgtgagtttgatagcctactgaatttctgagccttaattccattatctgaaaaatgaggcctttttcagagcttcgaagataacgggtattcagtaaatcttgatttcttcaaagataacgggtgttcagtaaatcttgatttctttcctcctccccatttttgtgatccatcacaaaaaaatggtactagataattaccctttaaagcaaagtgaaacaaaatctcaactttataattagtttggattagtctaaagttgagctttaaagaagatacggctctgtttcatcttctgtggggatttttagttgtgtctagttaactaaagcaacaaaacattcagattggctatatgtacctctctttttctcaatattgagttatttcttgacatcttagatatttagtatatagtacaaatagtacagaagccaaaatgattacatataagggcaactccatgttgattatataggtaggttgtgtcctgcacaaaggctcctgaaggagttgggagatccagatctaaagcccagggctgctagcatgctggggaaggggttttcctccttaccatgtacaatatcagtctgcccagtaagtctgcttgccaagccctgcgcatacaggactgcacaaaagagtgggcactgaatgggctaggaatgacctaaaaaatcataacaaaaaatcgtaacatttcctgcataactcgaaattattcatttgtcgtctctaaaataccttctgtttagcttaccttctcagaatcaccagtgaatttgtgagcattcagacgtcaaaaatacgtgctcaaaagtagtttttaaaaagagacaaaagaggccaggcgcagtggctcacgcctgtaatcccagcactttgggaggccaaggcgggcggatcacgaggtcaggagatcgagaccatcctggctaatgtggtgaaaccccatctctactaaaaaaaaatacaaaaaaattagccgggcgtggtggcaggcgcctgtagtctcagctactcaggaggctgaggcaggagaatggcgtgaagccaggaggtggagcttgcagtgagccaagatcacgccactgcactccagcctgtgcgacagagcgagactccatctcggggggaaacaaaagatgaaagaactgaagtaaataaaagtcatatttttaatatgtaaaactttctttcaggctactgttgctgcatttgctgccagtgaaggacattctcatcctcgagttgttgagctaccaaaaacagaagagggccttggattcaatattatgggaggcaaagaacaaaactctccaatctatatatcccgaataattccaggtggaattgctgatagacatgggggcctcaaacgtggagatcaactcctctctgttaatggagtggtaaggatgaattttatttctatttgtagtgatctgttgtgaccacctgggggcgtatttgagtaataggagaaacctaagaaacttgtggtttagaaatgccttgagggaatcctaggcagtactattaatacagtgatccttttttttaagcactataagtgtattttgcagtgtaaattagcagtgcttaatgtcatttttatgacataagctctttattaaaggcaatacattaaattagaagtctaccctcattttactcttataaaatgccaattgcttgatctactgaaataataaggcatatagattaatatgctaattatttggaacttaaaagccagcttttagactataaacagaatatgatgtaagagaggatttcatatagattaaaatggtaaggcaggattatttcttagttttgtaatgttggaataatataacattaaaacttttcttcattatatatattgtaaacatttttgcattttgagttactttcaaaacttagatattagtgtatggttggttgtttttttttcccctagagtgttgaaggagaacatcatgaaaaagctgtagaactgctgaaagccgcacaaggaaaggttaaattagtggtacgatacacacccaaagtcttagaagaaatggagtcgcgctttgaaaaaatgagatcagcaaaacgcaggcaacagacctaatacatttcaaaacttgatatttcattttgcgttttagctagagaagttttccttgtgacttactaatggctgcaatgccaatgattgtaagaaaacaaacaaatttatcatgaaattctccttgtcattttataaatgcctattttaacatcatttatggttccagagatgcatacacttttttctgacaagaaaaagtaaaaggtgatgagggcaattctgtcctactgtttttacaggcctttttcaaatgcagattttgtcataaagttgttatagattttttaaaatgcttttttaatattaaaatgtacttttacattcttaatctttttttagaaaggaaaagttttcttcatttagctgctgatttaaaagtaaagttctccaattctttttttttgcttactctattttttttaacctgtgaaatttctttacagttttccaagaaattaagcataacagtctcatctacggcagttcattacactgtcaatgttaacatcattgctgcattttgtactttgaacacacacataatatatataaccagtggtaaatcatgactcagtacagtgcaagttttttcacttttacttaaacataatatataatggatattcatttatactgatttatgaaagtaagtttttaaacactgaaacaatcattgctaaaatacatattcttaatatttgagcattgaggcaagaggatgtaattgatagcattacttattacatccctatttatgttcaaccgtacatcaaattataaatgcaaaacaggttcagatttcatcttttgtgatttcttttaaatactattcatttttatttaaatgcacagtatttcccctatattttagtccttccattcctagagacaaaccagttatttggtggtgggaagtagctgaagcaaagaaggaaaagtaatacctttaacctcactagcttcaagagtagacattcttactagctcaatttaaataattgattttaaataggaagaaaagaggatatatttaagatacatagaaattatgatgtgaagtattcatgagaatctgtagattccatcaaaataagtaggaactcatactaaaattgttggatttaaagaggcaacttttgtttatgattcaaatatgggaatttgagaaatatttcatttgtccactggatgtcactattttactaaaaggcagctattagtgtgggactgtgactgaggtcttaaagactgaaagagttggggttcattttctgttacaact

SEQ ID NO: 998 - DNA, 4031 bp, Homo sapiens
tatatgaacatgtctatgagactgtggacatcagtagcagtcctgaagtgagagcgaacgctactgcaaaggtaaatttttttgttttccaaaagtaagaattcttcataaattagaagtttaaaatatggagttattaaattcataataaacttactttgaagactaacatgtatctttcaagctacaccaaatttctcaagtactaagaaataagacatttgtttctattgcctttacataaatgctgcatgataaatagcttacataagctattttatcatgcagtttagataatgcaatagaaatgtacttgcatacaatatgtatcatgcaatatataattgtgttgtatatgttatatatatgatactatataatattcattatacaaaatctaatcagaattttaagatatgaattactatcctcatcttattgatgaggaagcatgaggtgatttgccgcaaaccacacaaatagcatatgatagagctggggtacttccccgagttgatttttgctttcttctttacattatctgcatttctgtgccattgttttcctcaaataatttaggtattgacctcactattcatgatagggggtttgaacagggtaatatcagcagtcggtgacttaaattaatcatcagcagatagttttttatggatagttactggctcacaaaaggaaatggtggattctttgttgaatacaaatacttaaacatgtggatatagtttatcagtgtagaaaagaccagagaaacatggttttaattgctgagttgtgtgagtttgatagcctactgaatttctgagccttaattccattatctgaaaaatgaggcctttttcagagcttcgaagataacgggtattcagtaaatcttgatttcttcaaagataacgggtgttcagtaaatcttgatttctttcctcctccccatttttgtgatccatcacaaaaaaatggtactagataattaccctttaaagcaaagtgaaacaaaatctcaactttataattagtttggattagtctaaagttgagctttaaagaagatacggctctgtttcatcttctgtggggatttttagttgtgtctagttaactaaagcaacaaaacattcagattggctatatgtacctctctttttctcaatattgagttatttcttgacatcttagatatttagtatatagtacaaatagtacagaagccaaaatgattacatataagggcaactccatgttgattatataggtaggttgtgtcctgcacaaaggctcctgaaggagttgggagatccagatctaaagcccagggctgctagcatgctggggaaggggttttcctccttaccatgtacaatatcagtctgcccagtaagtctgcttgccaagccctgcgcatacaggactgcacaaaagagtgggcactgaatgggctaggaatgacctaaaaaatcataacaaaaaatcgtaacatttcctgcataactcgaaattattcatttgtcgtctctaaaataccttctgtttagcttaccttctcagaatcaccagtgaatttgtgagcattcagacgtcaaaaatacgtgctcaaaagtagtttttaaaaagagacaaaagaggccaggcgcagtggctcacgcctgtaatcccagcactttgggaggccaaggcgggcggatcacgaggtcaggagatcgagaccatcctggctaatgtggtgaaaccccatctctactaaaaaaaaatacaaaaaaattagccgggcgtggtggcaggcgcctgtagtctcagctactcaggaggctgaggcaggagaatggcgtgaagccaggaggtggagcttgcagtgagccaagatcacgccactgcactccagcctgtgcgacagagcgagactccatctcggggggaaacaaaagatgaaagaactgaagtaaataaaagtcatatttttaatatgtaaaactttctttcaggctactgttgctgcatttgctgccagtgaaggacattctcatcctcgagttgttgagctaccaaaaacagaagagggccttggattcaatattatgggaggcaaagaacaaaactctccaatctatatatcccgaataattccaggtggaattgctgatagacatgggggcctcaaacgtggagatcaactcctctctgttaatggagtggtaaggatgaattttatttctatttgtagtgatctgttgtgaccacctgggggcgtatttgagtaataggagaaacctaagaaacttgtggtttagaaatgccttgagggaatcctaggcagtactattaatacagtgatccttttttttaagcactataagtgtattttgcagtgtaaattagcagtgcttaatgtcatttttatgacataagctctttattaaaggcaatacattaaattagaagtctaccctcattttactcttataaaatgccaattgcttgatctactgaaataataaggcatatagattaatatgctaattatttggaacttaaaagccagcttttagactataaacagaatatgatgtaagagaggatttcatatagattaaaatggtaaggcaggattatttcttagttttgtaatgttggaataatataacattaaaacttttcttcattatatatattgtaaacatttttgcattttgagttactttcaaaacttagatattagtgtatggttggttgtttttttttcccctagagtgttgaaggagaacatcatgaaaaagctgtagaactgctgaaagccgcacaaggaaaggttaaattagtggtacgatacacacccaaagtcttagaagaaatggagtcgcgctttgaaaaaatgagatcagcaaaacgcaggcaacagacctaatacatttcaaaacttgatatttcattttgcgttttagctagagaagttttccttgtgacttactaatggctgcaatgccaatgattgtaagaaaacaaacaaatttatcatgaaattctccttgtcattttataaatgcctattttaacatcatttatggttccagagatgcatacacttttttctgacaagaaaaagtaaaaggtgatgagggcaattctgtcctactgtttttacaggcctttttcaaatgcagattttgtcataaagttgttatagattttttaaaatgcttttttaatattaaaatgtacttttacattcttaatctttttttagaaaggaaaagttttcttcatttagctgctgatttaaaagtaaagttctccaattctttttttttgcttactctattttttttaacctgtgaaatttctttacagttttccaagaaattaagcataacagtctcatctacggcagttcattacactgtcaatgttaacatcattgctgcattttgtactttgaacacacacataatatatataaccagtggtaaatcatgactcagtacagtgcaagttttttcacttttacttaaacataatatataatggatattcatttatactgatttatgaaagtaagtttttaaacactgaaacaatcattgctaaaatacatattcttaatatttgagcattgaggcaagaggatgtaattgatagcattacttattacatccctatttatgttcaaccgtacatcaaattataaatgcaaaacaggttcagatttcatcttttgtgatttcttttaaatactattcatttttatttaaatgcacagtatttcccctatattttagtccttccattcctagagacaaaccagttatttggtggtgggaagtagctgaagcaaagaaggaaaagtaatacctttaacctcactagcttcaagagtagacattcttactagctcaatttaaataattgattttaaataggaagaaaagaggatatatttaagatacatagaaattatgatgtgaagtattcatgagaatctgtagattccatcaaaataagtaggaactcatactaaaatt

SEQ ID NO: 999 - DNA, 4047 bp, Homo sapiens
gagactccatctcaaataaataaataaataatctttctgccaggtgtgatggcccaagcctgtaatcccagcaccttgggaagctgaggtgggtggatcatgaagtcaggagtttgaggccagcctgaccaacagggtgaaaccctgtctctactaaaaatacaaaaattagccgagcatggtggtggactcctgtaatcccagctactcaggaggctgaggcaggagacttgcttgaacctgggaggcagaggttgcagtgagtggagattgcgccactgcactccagcctgggcaacagagtgagactccatctcaaataaataaataaatatctttctttactacatttattcatagttttctatctgcaaacacgaagaaggccatactaactctataaagaaaaatttccagtccttgagtgtaacgaaatcaggaacttctacttaagtcaaaaggaagcaaagcaataatagaatactgggcattgtagtaccaggggtacaaaaacagtataccaaaacagtttttggaaaaataaaagtagagatagttaacagtgttatagctgacttcctgaatcttctaaaatgtctcaattcataaaacacttatcctcacacttctcagtgagaattccctaatgtgcttcatacatttgtataaatgtatacaacctcttagggttttttttgtttgtttgtttgtttttgttttgtttggttttttgtagatggagtttcactcttgtcacccaggctggagtgcagtggcacaatctcagctcactgcaacctccacctcctgggatcaagcgcttctcctgcctcggcctcccaagtagctgggattacaggcacccgccaccatgcctggctaatttttgtattttttttagtagagttggggtttcaccatgttggccaggctggtcttgaactcttgacctcaggtgatccacccgcctcggcctcccaaagtgctgggattacaggcataagccactattcccagccaatatttcttatgattaattggtaccaatgtaacataacacttttgcttgctaagcccttttttatgtattttgtggttcagttgttaactgaactcataactcttcctcataacccttatatggaaggtactgttatttccattgtacagtgaaagaaactgagacataaggacatcatgtaacttgcccaaggtcacacaggtggtattgagaccagattgataaagctaattgtttttatttttcttttttgtaaacataagtgttggagcttgtttgaattaacagtgttaattaagttgaaaaaaaatcagtttatttcatttgtactgcttgttttttgcatttttatggttgttttaaatgtgtccctgccactaactgcatctgctctcgagtggttatctacctatgtatcatgtttctttcgaggaatgaccagtgattttactagcttatagtgccttgtactgttcagtgctttggttactaataataattaggtaaatttttattgactagtttctgacaatattgctagcttttctgaagcagtacaatgttcatgtatcggtcacatttgagtcacagtcctttccgatgacatttggtattttgtgttcaatttgcctgtgtttctccaaggtcttattttatgcttctgtaatctcagtagtttttcctatctactgtaaaatttagtgttcttacattttacattctcaccctccatgtgtgtacacacacacagtctccttcccaccaaatgtgcaaattcaatgctttttttcccctcgattgtctgtatattatttgcccttgaggaatgaatcctaactgccccactgttacataggcattgagaaaacccttggagaaaattatctgtgtgtgtgtttaactctagatatttgtagagcaattgaattattggaaaaactacaaaggagtggagaagtaccaccacagaaacttcaggctttgcaaagagtccttcaaagtgaattctgcaatgctgtgagagaggtgagtaaacatcattaaaatttacaaaaatttgagttaattaggtcagataatactctaaatttgggttcaacatttcttaagaaaaactttagaaaacattaaaaccagtccctctcatttttggaatttctgataaaaccattttataaagatgcataactttgcctgaaattttaacttcacagagaactcaagcatggtatattctgagatataactttggcttttacaggtatatgaacatgtctatgagactgtggacatcagtagcagtcctgaagtgagagcgaacgctactgcaaaggtaaatttttttgttttccaaaagtaagaattcttcataaattagaagtttaaaatatggagttattaaattcataataaacttactttgaagactaacatgtatctttcaagctacaccaaatttctcaagtactaagaaataagacatttgtttctattgcctttacataaatgctgcatgataaatagcttacataagctattttatcatgcagtttagataatgcaatagaaatgtacttgcatacaatatgtatcatgcaatatataattgtgttgtatatgttatatatatgatactatataatattcattatacaaaatctaatcagaattttaagatatgaattactatcctcatcttattgatgaggaagcatgaggtgatttgccgcaaaccacacaaatagcatatgatagagctggggtacttccccgagttgatttttgctttcttctttacattatctgcatttctgtgccattgttttcctcaaataatttaggtattgacctcactattcatgatagggggtttgaacagggtaatatcagcagtcggtgacttaaattaatcatcagcagatagttttttatggatagttactggctcacaaaaggaaatggtggattctttgttgaatacaaatacttaaacatgtggatatagtttatcagtgtagaaaagaccagagaaacatggttttaattgctgagttgtgtgagtttgatagcctactgaatttctgagccttaattccattatctgaaaaatgaggcctttttcagagcttcgaagataacgggtattcagtaaatcttgatttcttcaaagataacgggtgttcagtaaatcttgatttctttcctcctccccatttttgtgatccatcacaaaaaaatggtactagataattaccctttaaagcaaagtgaaacaaaatctcaactttataattagtttggattagtctaaagttgagctttaaagaagatacggctctgtttcatcttctgtggggatttttagttgtgtctagttaactaaagcaacaaaacattcagattggctatatgtacctctctttttctcaatattgagttatttcttgacatcttagatatttagtatatagtacaaatagtacagaagccaaaatgattacatataagggcaactccatgttgattatataggtaggttgtgtcctgcacaaaggctcctgaaggagttgggagatccagatctaaagcccagggctgctagcatgctggggaaggggttttcctccttaccatgtacaatatcagtctgcccagtaagtctgcttgccaagccctgcgcatacaggactgcacaaaagagtgggcactgaatgggctaggaatgacctaaaaaatcataacaaaaaatcgtaacatttcctgcataactcgaaattattcatttgtcgtctctaaaataccttctgtttagcttaccttctcagaatcaccagtgaatttgtgagcattcagacgtcaaaaatacgtgctcaaaagtagtttttaaaaagagacaaaagaggccaggcgcagtggctcacgcctgtaatcccagcactttgggaggccaaggcgggcggatcacgaggtcaggagatcgagaccatcctggctaatgtggtgaaaccccatctctactaaaaaaa

SEQ ID NO: 1000 - DNA, 4046 bp, Homo sapiens
tcacttgaaccctggaggcagaggttgcagtgagccaagatcgtaccactgcaccccagcctcagcaacagagggagactccatctcaaataaataaataaataatctttctgccaggtgtgatggcccaagcctgtaatcccagcaccttgggaagctgaggtgggtggatcatgaagtcaggagtttgaggccagcctgaccaacagggtgaaaccctgtctctactaaaaatacaaaaattagccgagcatggtggtggactcctgtaatcccagctactcaggaggctgaggcaggagacttgcttgaacctgggaggcagaggttgcagtgagtggagattgcgccactgcactccagcctgggcaacagagtgagactccatctcaaataaataaataaatatctttctttactacatttattcatagttttctatctgcaaacacgaagaaggccatactaactctataaagaaaaatttccagtccttgagtgtaacgaaatcaggaacttctacttaagtcaaaaggaagcaaagcaataatagaatactgggcattgtagtaccaggggtacaaaaacagtataccaaaacagtttttggaaaaataaaagtagagatagttaacagtgttatagctgacttcctgaatcttctaaaatgtctcaattcataaaacacttatcctcacacttctcagtgagaattccctaatgtgcttcatacatttgtataaatgtatacaacctcttagggttttttttgtttgtttgtttgtttttgttttgtttggttttttgtagatggagtttcactcttgtcacccaggctggagtgcagtggcacaatctcagctcactgcaacctccacctcctgggatcaagcgcttctcctgcctcggcctcccaagtagctgggattacaggcacccgccaccatgcctggctaatttttgtattttttttagtagagttggggtttcaccatgttggccaggctggtcttgaactcttgacctcaggtgatccacccgcctcggcctcccaaagtgctgggattacaggcataagccactattcccagccaatatttcttatgattaattggtaccaatgtaacataacacttttgcttgctaagcccttttttatgtattttgtggttcagttgttaactgaactcataactcttcctcataacccttatatggaaggtactgttatttccattgtacagtgaaagaaactgagacataaggacatcatgtaacttgcccaaggtcacacaggtggtattgagaccagattgataaagctaattgtttttatttttcttttttgtaaacataagtgttggagcttgtttgaattaacagtgttaattaagttgaaaaaaaatcagtttatttcatttgtactgcttgttttttgcatttttatggttgttttaaatgtgtccctgccactaactgcatctgctctcgagtggttatctacctatgtatcatgtttctttcgaggaatgaccagtgattttactagcttatagtgccttgtactgttcagtgctttggttactaataataattaggtaaatttttattgactagtttctgacaatattgctagcttttctgaagcagtacaatgttcatgtatcggtcacatttgagtcacagtcctttccgatgacatttggtattttgtgttcaatttgcctgtgtttctccaaggtcttattttatgcttctgtaatctcagtagtttttcctatctactgtaaaatttagtgttcttacattttacattctcaccctccatgtgtgtacacacacacagtctccttcccaccaaatgtgcaaattcaatgctttttttcccctcgattgtctgtatattatttgcccttgaggaatgaatcctaactgccccactgttacataggcattgagaaaacccttggagaaaattatctgtgtgtgtgtttaactctagatatttgtagagcaattgaattattggaaaaactacaaaggagtggagaagtaccaccacagaaacttcaggctttgcaaagagtccttcaaagtgaattctgcaatgctgtgagagaggtgagtaaacatcattaaaatttacaaaaatttgagttaattaggtcagataatactctaaatttgggttcaacatttcttaagaaaaactttagaaaacattaaaaccagtccctctcatttttggaatttctgataaaaccattttataaagatgcataactttgcctgaaattttaacttcacagagaactcaagcatggtatattctgagatataactttggcttttacaggtatatgaacatgtctatgagactgtggacatcagtagcagtcctgaagtgagagcgaacgctactgcaaaggtaaatttttttgttttccaaaagtaagaattcttcataaattagaagtttaaaatatggagttattaaattcataataaacttactttgaagactaacatgtatctttcaagctacaccaaatttctcaagtactaagaaataagacatttgtttctattgcctttacataaatgctgcatgataaatagcttacataagctattttatcatgcagtttagataatgcaatagaaatgtacttgcatacaatatgtatcatgcaatatataattgtgttgtatatgttatatatatgatactatataatattcattatacaaaatctaatcagaattttaagatatgaattactatcctcatcttattgatgaggaagcatgaggtgatttgccgcaaaccacacaaatagcatatgatagagctggggtacttccccgagttgatttttgctttcttctttacattatctgcatttctgtgccattgttttcctcaaataatttaggtattgacctcactattcatgatagggggtttgaacagggtaatatcagcagtcggtgacttaaattaatcatcagcagatagttttttatggatagttactggctcacaaaaggaaatggtggattctttgttgaatacaaatacttaaacatgtggatatagtttatcagtgtagaaaagaccagagaaacatggttttaattgctgagttgtgtgagtttgatagcctactgaatttctgagccttaattccattatctgaaaaatgaggcctttttcagagcttcgaagataacgggtattcagtaaatcttgatttcttcaaagataacgggtgttcagtaaatcttgatttctttcctcctccccatttttgtgatccatcacaaaaaaatggtactagataattaccctttaaagcaaagtgaaacaaaatctcaactttataattagtttggattagtctaaagttgagctttaaagaagatacggctctgtttcatcttctgtggggatttttagttgtgtctagttaactaaagcaacaaaacattcagattggctatatgtacctctctttttctcaatattgagttatttcttgacatcttagatatttagtatatagtacaaatagtacagaagccaaaatgattacatataagggcaactccatgttgattatataggtaggttgtgtcctgcacaaaggctcctgaaggagttgggagatccagatctaaagcccagggctgctagcatgctggggaaggggttttcctccttaccatgtacaatatcagtctgcccagtaagtctgcttgccaagccctgcgcatacaggactgcacaaaagagtgggcactgaatgggctaggaatgacctaaaaaatcataacaaaaaatcgtaacatttcctgcataactcgaaattattcatttgtcgtctctaaaataccttctgtttagcttaccttctcagaatcaccagtgaatttgtgagcattcagacgtcaaaaatacgtgctcaaaagtagtttttaaaaagagacaaaagaggccaggcgcagtggctcacgcctgtaatcccagcactttgggaggccaa

SEQ ID NO: 1001 - DNA, 47 bp, Homo sapiens
gaagggaaaattggtttgaataaaatacagatgtctattccgctaac

SEQ ID NO: 1002 - DNA, 45 bp, Homo sapiens
gtcctcagagaaaaataagactaagaatcaacctttctaatgaga

SEQ ID NO: 1003 - DNA, 81 bp, Homo sapiens
tgagacccaaagctgctggctgtgttatatttcacagttcacagttctctctctctctctctccccctctacacacacgcg

SEQ ID NO: 1004 - DNA, 4047 bp, Homo sapiens
tgttcgaaagtgtcagccaatgatgtcaagcctcttgaacctgccttgggcccattcacgctctccagagtcccatgggtccgcacacctgggtaggccaagccaccttgtcctcggatgtttgcttctttcatgggggcagccttcatgcaaccaaagtatgaaataaccatagtaaggaaaaggatggtcatcactcttctcacctggtggaactgtagggagaaagcagaaacaagacagaaaactggttagggctttctttcaccgggatgccatgtggcccatctgattgtaattccaggccattctgcagggtcaaggtttttttatgtcttggtgataaactccagctgcaccagacacaaatcagtgtcagtagtgtgctgtatgtggtttaatataaaccagagacatgcagtgtttcccccaagatctagcatataaacctgagattagatggcttctaagcaagtgcaaaaattgtggcttcaagttctccttcttcccactttagcagctttgtaagtttaatttttaatgatctctgctcatgctgtcacgagaaacacaaaatcataaatgttactaagcaacaactgcaagtgtaattaatagtaatttttttcaagttagcaacatggtcctttgcaggaatgtgtgacaggaacagcagtggcctgaggggtctgatgggcctttctagctatgtgatgtctaggcatgaatagcacaataaaacagcagttggggaactataaggagcctttaaattgactttttttttcctcttcccacagagatactctattatagcaaagaagaaagataatttcattgagccatcctgttttacaggtaaggaaaccaaaggccatagaagacttgccttatgtcatgaagaaagtttatgttagaactcagggctcccaattccactgttctttattctacacctgggtggtcacaactgaaaatgttttgcttatttctaaacagaaatcattttttgacatgttcattttaatgatgtgtctatgcctggggctaatgtcatgaaaacaatgtgtctggtaaggagaaaactgaaaaagtcagcattaaaaagacatttaagtccatttcaaatgcctcccatatgcagactccactttatctcctccagttctctaaaacccttcactccttggctttttctggctaatacacacatctagctaagaaagctcaacttttctttttactagagatgttctctctgtgtgtgtgtgtgtgtgtgcgcgcgcgcgtgtgcgcgcgctctgagtttatcctacttttaaaaagctgagtggtgttttacacattttggaataggcagctagtgcttctttttctgcttttgaagtttcctgggaagtcccttaaaagcataccacaaaattaatctcttcctgtttgccagagggttgctctactctaaatttggctctacatctacaagcatgctctaggaagccaattaaaatggatgaacaagcaaaatgaaaacatacctatggaccaacccaaggttaccgtcaggtggtgaaggacttcagaatcacttacctgaagcattgtgtttctcagcagcaaagagtagcatccccagccctgaccctaattttattcctacttctcagttctgaggcatggacttacaaaaagacacatacatgcaatggccatcatgatatccaaataagtaggaaaaggaactgtgtttctgcccatgaagttttactgaattcaaaggcaacctacctccagtcaataggtcagaatgcagaaatggctgaaaactctggtattgaaaagcaaatgttctccacttttgtaagaaataacattttcaaccactaagagactttattaccatccctaaacacacaaaaaaatttcttttagatttactctcactttgcacgaatagcaaacatgcttagaactgcttagattgcacaatgttctcagattaggaagggaaaattggtttgaataaaatacagatgtctattccgctaacaactaaatctttgtgaatgttctgagtcctgtaccatcaaagaaatagatcgtccatgggggtttctatttctggtagattgtacttacacactgaatgaaaaagctttctcctaatattcccagtccaaataaaaacaacccaaggggcacctcttatttaggtcaataaaagtttgcaaatgtggaatactttagccatctacatcacactggtagagactttctgtgatcagctattttttaataccatatttaatcaaatctaagataccatcattgtgaaactcgacattttatatatcactaagaaagcaaaaatgcagcctgggtgaccagagtgaaactccatctcaaaaaaaaaaaaaaaagaattaatgaactatagtttaatacatatttactaagtgcccacactaactacttaaaaatggtccaaaatactgaggcatcttaagctgttggaaaattgttttgttttcaccactacagtaatgagtctttgaatgataccattttctatacttggcttctagtttactctgcctttcactgatcttatctttttattaataactttatgagaaaaataattaatgctttatatattgttctctcagttccatgagcaaatatttcagagggaaaattggcatctgagtaaatattacttggctttcattctgaagcccaaacatgggtattcctcaagctgagcatctgcatagaattaggaattaacacaatggtgacaaagtccaaccccacattgcaagccctgctctctgagtggcacttctgcaattctaactaactgtctactcacttgtaaggccttgaagttaagtgggtgcaacaccaaactcaatactttttgttggaacagtggtatctcctaccttttctaacaatggttccctgatattttgggcaacccaggcataggatagaaatcctggaatcaagtttgacaatatatttcctgcatagccttccaatccagtcagtaaagatgtcctgttaatttttcctttaaaatatttgtcctggccatccctttttatccatcccactgccaccatcttggctcagccctcaccacctcattttgtgaccacaacgtcccgatgctgtatcagacactctttctgctccattcaactctgatgaccacttcctgggtaaccaccctaatactattctcttacacaaaaactggcaatggcatttttgttctatctgctcaaatctaatgtcttctctctgatactcaactctctccaacatctgccctcacccttcttagctaactttctcaaactactcaatgcttcatcacttctgctccgatcaggacagagtccttggagtgccgtacacattactgcctcctgacttgttccattcctctgacaaactcctctctccctctcacttgctgccaaaatcttgcttatccttcatgatccagttcaagcatcaaatcatgcatgcccctttctctaattactccagcatacactgccttccttccctaaaattccacattacatcttacgtagtacttgattcccttctcacttgttttgttttgtttttttcccaagacagagtcttgctctgtcgcccaggctggagtgcaatggtgcaatctcggctcactgcaatctccacctcctgggttcaagcaattctcctgcctcagcaggaggtagctgggattacaggcgcccaccaccatgcccggctaatttttgtatttttagtagagacagggtttcaccatgttggccgagctggcctactcacttgttaattgttaaccgtatttgctcattctagtcagtcttcagctgaaaggtaagttctttgagggaatggatcatgtctgagcccccataatgcttaacagagaaaaatgtaatagcagtactcagtaaaaacttactgataggtttattaaactaagagaaaagacagtttggatataattttcgtaag

SEQ ID NO: 1005 - DNA, 4045 bp, Homo sapiens
agctcccagctcttctgaagtgtcacggttcatttcaacagcacgagtaaggcagtttccaggccctgtgcataatgagccatgtggaccctattcaagaaactggctgtactccagaactactataaaatataaggaaaatattaacatcttagatgacaaaagatccatatggctggccagaaaatatctgcatcatttaagccattagaatgcacctatatggaaacattcaatttggcggtactgtgaacaacaggactgtgaaaacatctgtttatctccacccgttttcactaaacactgattcctatagaagacatgcaaactcaaataccaacatatttcatctaagcataggacagggactccatttttacatagttgctataataaatacaatacagtatttgttggtgataggattttggaagatgctctggatagctggaaaaataagtaaaatgtttctctttgtattaaacttgataaaaaataatagctaacatttattaatggtgaggtaaataatttgattatccaccatttatagctgaggaaactgaggcccagagagtttcggtggattccctaagatcacatacccattatgtggtggagagggaatatgaaccagtgctggcttgctatgcctctttccatatggggtcagacatagatgtggtgtcttataatgtgagggaggtctacttggcagaaatatcctgcagaccctatatgccagtttcttatttatttaaacaaagccccatatgagcatttctgataagcagtttgtttacacactaattccacagaggttaaatataaccctaatgtttctttgttgctactctgtttccagtattgaattattaccacaaggtaccaaccatatatgcatacttaatagggtattttgtcaaaactatgcatgaaggtcatttgtttgagatgtcagaacattttcccgtgagaagatctcattgggcattgaaacagaaccacatgctcttcagaccagcaaccgcgactaccaaatactcctctgtcaactctacttgagtaagaacgctttcaattaaggcctaagtgtcaacatgcctttaaaaaaaatcgtggtgacacaaaatctttctttttagcacccaacagaatcccttcaaagcctcgtggtctgacaccctatgctacgtgacttgtgacccatccatttgtcatgttcttcgggaatgtggctaaggggctaagatgtgacttgaaaagaaaggtagaacaagatcatctcaaatttattatcaaggaatagttcagaaaacgacttcagaccacagagacagcagaacagatggtccggcatggatagagcatcagacactcacagactgtgccaacaagagccatcgagtcaaaacagccaaaggaaggagggtcatggaatgggttctctcacaccaaactgatgcccagaggccctcagcatgaataacaaaggcaaccagacccacaagccatactgagtggatacaaaacctatacctaggctgacatcccaaatgtgtgtggcaagttagatgatgatggcacaaaagacagaacaccttgcttctggccattgtcagctcttggaagagagcacacttttagaggagcagctgcaaggagcctgagaacaaaactggaaatgtctgttatgaaagccttcacaggtattattaacaaaagaaaatgtctatttgtcaatggtgtttcagctagattttggcagtccattcttatgcccaggaatgacctcttgtgtagactggatacagtcatcaatgcaactgtccaggtgcaactcttctataaaggggaagaggagtgactttcccctatacagtggccctgtcaaaattctataaaaaatattgtccatttaaattaaataaccactgtgcccggctccatttaccacacttttctatgcagtggaactgaaggggatttttttttttgctgtcctcagagaaaaataagactaagaatcaacctttctaatgagaatggtaaggagttatgtggggatgacctggaatatatgctgctcaaatggtggagatgttatctaggccgtaaatcatggcatttttatatgatcccctatttgcctaatgcaggaaaccacttggcaactttaaggaaaaagtctagcaataatgcatcatagttcaatgtttatattgtacttggacagtttaaatttatcttataaagtactaattatttaattacaaatgttgagtaagtgtaaaatcattcctcaaaaaagcatcccttgagtatgaaagttccaagcttagcaagacatccctgtgatttgggatacatctcttgaactcagtcctgaaaataatgttaatagctgagaaaagagcattgaaagccttatacacagtgtgttgtagtgaaacaattttctttttggttctaaaaaacactgttgtgctctttagatccagcatggctagttagatgaataatgaatgcatgttcaactttctgctacaggaaattctgcaagtggcaacgtgggtccattccgtgtgtgtcactagagctggcgcaagcccatggccatggtgaggcagcgtttccactggaactaatctgatacctgcaccagctcttgcaactgtgcagtgttcccactgcaaactacggatggggtaaaagactgctcacctcctatttctcatctaatctcacacactctgtttgatgaggctatggagaaacaggtcttctcatacactaaaggtgggagtacaaacaattcaagccctgtgcaggacaattaggcaatacctatcaaaattatacatgatttttcctgctgacccagcaattccacttctgggaataattgacagatataggtgcatatgtacaaaatgatggaaagctctctggtatatattagtaagtgataaaacaaggtgtaaaatagtgtatatatggctactaccttttgttttaaaaatgggggaaaatggtggagcttgcggtgagccgagatcgtgccactgcactccagcctgggcgacagagcgagactccgtctcaaaaaaaaaacagggtggggtgggggggaaataatagtacatactcatatttacctgtatctatataaaacacactatcaaggattcacaagaaactaatacaaatgatcaccttatagatggtatgtattgggggatactgaggtgagcagggtataagtggggcaagacttttcagtgtaaacttcttttaaattttattttgatttttgaataatgtaaattaactgtcaaataattaaattaaaaataaccaatttattaacaaaacatttaatctagtggctttacttttgacacaagacaatctccaaatctccaccaatcaccaaaaacagagatttacaccagttcctttgcttgtttttcctggtaatgactacaattaagaagtcctgtgggtgccatctcagttttggagatatttccctagaagaaactgattcaaggtgggacaattgggtatagagaatagtccctgggaccgggggctgaagtcctgaattctggtcctgcctaactcccactttctattaagctgaccctgtgaaacggctgatacatgaccattttttaccaacaaattagacaaattcatgggtgatcaaattcaaaaaccctgttgccttaccactgtaatatgatgaggacacgtatacacaccctgcctaactcacagcatcacaccagggattgtcaacatatgggaaagagctttgtacattgtaaaggtcaaccctacaaacagcagctgtgaaacacaacacaaccctgagggggtggccatggccaaacataggaggggaaaaggacccagtctcaaaagcatctgagatactgagatagtgcagaggaatgaaatcttccaaaagatggaatctaaacataaacagacatcaagagcgggctgacttgcagtggaagatgtggttaaatgactc

SEQ ID NO: 1006 - DNA, 4081 bp, Homo sapiens
aattccacatgcaacccccacccccatacacactcacaagatctgaatatggtaacaaggaaatcctagtaactgtagcgttggaaaaatggttcatatggaaataagccatttggctagtaaagctggtgattttgttctctaggtggcactattacttcaatttttggtgagttgcttaaattacttggaactgcccgtttattttctttgaattcccattttataaattttaattttatacaagctagttgtaattaaacgacaggttgccttctaggttttatttcagtaagtcaatttgaagttcagtgattttttatcatataattttatgtttccttactatactgtcttagttttaagaaatcctcccttgcctgacctcctctctccaaaaatgcagaggcatgtcaaaaacacagagggtcgtcataaagtttccgtcagaccaaaggaaccaagatgaaagcatgtttaagagctactaggttctgggagatttcaaaatcaggacattactaccatgacaaccaatgaaaagttctttcaagtgaacctttggggaaaactatataacgttccttactctctaggctctctggaaataaacttttactttattatggctgtcactaaagcttgtaaatttactttgcttccttccaatcgttctcctgtcccacactcagccccctaactcacttaatgcaacccatcctcaaacatcaatctataaatgagacatcagggcaatgagccacttcttagcatctagtatatttgataagatttgtctcatcaagaggataagtgccctagagcttctacttgaacttaaatacttaatttaaatgaaagcttccacacttatctgaccagatactcaaatttttctacagaaaagagaataccttcctgttccacttaaagaacacacacatttaccactccccctcctctcccctgcaaaaggttttcaatgtcagtacattagtgagctccattttgcatctgccatcaataatgattccatatagtcaataattgggttcatgacctttctaaatctttacagtgtaaatattctggaaatccagtgaggcacttaagtataaaattatttaggattaaataattctatgccttaagtagaagtttaagaggacgtttaggacacacatgactaagcctacaaataccaaagccactctatgtttcctaggtttaaataccacatgcaaataacatacggatttcatttgccagcatcatttattgcctaacattactccatactaaacagagtaaatggatgcagagtgtaaccagtaagtttgctcattcacttttgaagctcatctgtgcatgttattcatcctaataaagaaaatttatcacaacacaacttgatgcgattcttgttcaaatgatttcctcttccattgaacaacagccagcacttaaaacctagaattccacagaattctctcctcgattcctctttaaaatgcaattcacagtttgagatcacagagcctgccagtggctgaatggctgcactagatggctgagagtccttcaattaagcaacaattttgcaattagtggaaactgagtgctctataacaattgtttgaaaacaagttgagacaagttagcaattaccctataaaagggacatattcacttttgttggataggcgagacccctcacacaaattgaactcttccacacagggagatgcaagttgaaaattaatgttttaatcactaaaatcaaatccatattatgggcacctgaaatgggagtgcctttcttctcaaaagatattcagagtttagctatcatccactctctatgctgtctgtttttattcaggaagtctgaaattgttcttctgtactccgggattaatttcctacatctcaaaatgttaataaactacttgaacatgacctttccattctgtaaatttccttaagagtaagtctacgattgagacccaaagctgctggctgtgttatatttcacagttcacagttctctctctctctctctccccctctacacacacgcgcacgtgcacgcacacacacacacacacacacagagagagagagagagagagagagagagagagcaccccaggttttagaagatgaatgtaaaaagaatgtaaacaagttctctgctatactatcaggtgggcgtgcccagctcactgtgcgtgctgaactacaaaccagtgctattcatataagaaatgatatcaatcatctacattttgactattgaaaagctgggactcttaaagattccaggaaaaagggaatagcttacattttcatggcgccccttttaaacaggaaacccacggactttgagccaggattttagaaatttgcatttctttttttacaggattttccctcctggtgagtcaaaatgaacaagaaataccccaggacctcccttccctccttggccattaatgagatgaaggcaattaactcacatagtataaatgaatcatttgaggtgatgactgcattttaggcaaatgatgactttcttggttccattggtttgcaagtaaaagttacacacattgaaaagacactgaaacagatttcctaaatgcttcattttctggatgcaccaatgttgacctactatacatgttaaatggttttaaaatatcaccttaaaataaaggaaacttccagctactaactcagctctgaatgggctatgaaaggctccaaaggtatgtgaaaaattactgttattttgctttaaaaaatgtgatgtctaagagtgtctgcaatgttctaatgcttcaaaacatgtacgtaagccttgtttatctggaaatcatttctttctgcttatatcatttataaatagaaaatgttctgtaataacttaaaatagttccacatacataatgcttttagtgtcataatacttactactggtctatatttaccaacatttatcacattttacaaaatgaagtagaagaaaaaaaagacaacgactttatggccctggaattccagtaatggtgaccaacatgttttaaattccagtaaaggttatggttacatttcaacaagtgtctctttccttttttttacctctcctgctaacccagaggtaaatttcccaaaaaaaaaaaaaaaaaaaaaaaaaaaaaagtcttaagcaaggcatttgcaaaatcagaaaacaggaacaggagtttagtgattgtttttaaaaggtgctgttcccagggtcaaaactttgtggtgtaatttcaacatgctatgttacctattatgtgtaatgccttgaaacgctacatgccataacatcagaaatctccaacctaaaaattatgttgcatgagataagcattgaaggcacacacgttcatacaaattaaatctgtaattatgcctcaataagttaaaatgtaaagacatatcaaattgtaagaccaaaatggcttttgaccttacaacaaactcatataaaaatagatttttccataataataaaggggagagagagattttgcaggatattgagtcagtagggaggggtctcatttaatatcatgtcgccttttatatgcagttagaaaatcaacgttcccaattacatattactttgctttaaaagattactaggaggattaataaacactcagaaatatgcctttctttgcttctggccaagaacattcctgcgtgcttgtcggaaaatgttctttggttgctactgacattaaggagtaagtgcaggataactagaggaccctaaaataagatccaagaagccctaacacaccgccaatcgaggcttatcaaagctcccccagcgcgaggaaaacttgcatagaagccaaacaagaacgaggagtcaaaatccaccgacgacgagtcgcacgccccaccgagctggagtcagcagcaccattcaacaagtccctcctaccagctctctaagggatcccgcaaaaccttcctttaccacttccccacccccagcctcccgcccccagtagctgctcttggcagcatggccggc

SEQ ID NO: 1007 - DNA, 76 bp, Homo sapiens
tacagaagcataaaataagaccttggagaaacacaggcaaattgaacacaaaataccaaatgtcatcggaaaggac

SEQ ID NO: 1008 - DNA, 50 bp, Homo sapiens
gcttctgctgtgctcaccaagggagcgcgtgtgcggcgtgtgtctgcgaa

SEQ ID NO: 1009 - DNA, 43 bp, Homo sapiens
ggagggcttacggttaacagacaaaataccgtaagcgcccttc

SEQ ID NO: 1010 - DNA, 4076 bp, Homo sapiens
aagcagacttactgggcagactgatattgtacatggtaaggaggaaaaccccttccccagcatgctagcagccctgggctttagatctggatctcccaactccttcaggagcctttgtgcaggacacaacctacctatataatcaacatggagttgcccttatatgtaatcattttggcttctgtactatttgtactatatactaaatatctaagatgtcaagaaataactcaatattgagaaaaagagaggtacatatagccaatctgaatgttttgttgctttagttaactagacacaactaaaaatccccacagaagatgaaacagagccgtatcttctttaaagctcaactttagactaatccaaactaattataaagttgagattttgtttcactttgctttaaagggtaattatctagtaccatttttttgtgatggatcacaaaaatggggaggaggaaagaaatcaagatttactgaacacccgttatctttgaagaaatcaagatttactgaatacccgttatcttcgaagctctgaaaaaggcctcatttttcagataatggaattaaggctcagaaattcagtaggctatcaaactcacacaactcagcaattaaaaccatgtttctctggtcttttctacactgataaactatatccacatgtttaagtatttgtattcaacaaagaatccaccatttccttttgtgagccagtaactatccataaaaaactatctgctgatgattaatttaagtcaccgactgctgatattaccctgttcaaaccccctatcatgaatagtgaggtcaatacctaaattatttgaggaaaacaatggcacagaaatgcagataatgtaaagaagaaagcaaaaatcaactcggggaagtaccccagctctatcatatgctatttgtgtggtttgcggcaaatcacctcatgcttcctcatcaataagatgaggatagtaattcatatcttaaaattctgattagattttgtataatgaatattatatagtatcatatatataacatatacaacacaattatatattgcatgatacatattgtatgcaagtacatttctattgcattatctaaactgcatgataaaatagcttatgtaagctatttatcatgcagcatttatgtaaaggcaatagaaacaaatgtcttatttcttagtacttgagaaatttggtgtagcttgaaagatacatgttagtcttcaaagtaagtttattatgaatttaataactccatattttaaacttctaatttatgaagaattcttacttttggaaaacaaaaaaatttacctttgcagtagcgttcgctctcacttcaggactgctactgatgtccacagtctcatagacatgttcatatacctgtaaaagccaaagttatatctcagaatataccatgcttgagttctctgtgaagttaaaatttcaggcaaagttatgcatctttataaaatggttttatcagaaattccaaaaatgagagggactggttttaatgttttctaaagtttttcttaagaaatgttgaacccaaatttagagtattatctgacctaattaactcaaatttttgtaaattttaatgatgtttactcacctctctcacagcattgcagaattcactttgaaggactctttgcaaagcctgaagtttctgtggtggtacttctccactcctttgtagtttttccaataattcaattgctctacaaatatctagagttaaacacacacacagataattttctccaagggttttctcaatgcctatgtaacagtggggcagttaggattcattcctcaagggcaaataatatacagacaatcgaggggaaaaaaagcattgaatttgcacatttggtgggaaggagactgtgtgtgtgtacacacatggagggtgagaatgtaaaatgtaagaacactaaattttacagtagataggaaaaactactgagattacagaagcataaaataagaccttggagaaacacaggcaaattgaacacaaaataccaaatgtcatcggaaaggactgtgactcaaatgtgaccgatacatgaacattgtactgcttcagaaaagctagcaatattgtcagaaactagtcaataaaaatttacctaattattattagtaaccaaagcactgaacagtacaaggcactataagctagtaaaatcactggtcattcctcgaaagaaacatgatacataggtagataaccactcgagagcagatgcagttagtggcagggacacatttaaaacaaccataaaaatgcaaaaaacaagcagtacaaatgaaataaactgattttttttcaacttaattaacactgttaattcaaacaagctccaacacttatgtttacaaaaaagaaaaataaaaacaattagctttatcaatctggtctcaataccacctgtgtgaccttgggcaagttacatgatgtccttatgtctcagtttctttcactgtacaatggaaataacagtaccttccatataagggttatgaggaagagttatgagttcagttaacaactgaaccacaaaatacataaaaaagggcttagcaagcaaaagtgttatgttacattggtaccaattaatcataagaaatattggctgggaatagtggcttatgcctgtaatcccagcactttgggaggccgaggcgggtggatcacctgaggtcaagagttcaagaccagcctggccaacatggtgaaaccccaactctactaaaaaaaatacaaaaattagccaggcatggtggcgggtgcctgtaatcccagctacttgggaggccgaggcaggagaagcgcttgatcccaggaggtggaggttgcagtgagctgagattgtgccactgcactccagcctgggtgacaagagtgaaactccatctacaaaaaaccaaacaaaacaaaaacaaacaaacaaacaaaaaaaaccctaagaggttgtatacatttatacaaatgtatgaagcacattagggaattctcactgagaagtgtgaggataagtgttttatgaattgagacattttagaagattcaggaagtcagctataacactgttaactatctctacttttatttttccaaaaactgttttggtatactgtttttgtacccctggtactacaatgcccagtattctattattgctttgcttccttttgacttaagtagaagttcctgatttcgttacactcaaggactggaaatttttctttatagagttagtatggccttcttcgtgtttgcagatagaaaactatgaataaatgtagtaaagaaagatatttatttatttatttgagatggagtctcactctgttgcccaggctggagtgcagtggcgcaatctccactcactgcaacctctgcctcccaggttcaagcaagtctcctgcctcagcctcctgagtagctgggattacaggagtccaccaccatgctcggctaatttttgtatttttagtagagacagggtttcaccctgttggtcaggctggcctcaaactcctgacttcatgatccacccacctcagcttcccaaggtgctgggattacaggcttgggccatcacacctggcagaaagattatttatttatttatttgagatggagtctccctctgttgctgaggctggggtgcagtggtacgatcttggctcactgcaacctctgcctccagggttcaagtgattctcgtgcctcagtctcccgagtagctgggactacaggtacctgccaccaggcccagctaatttttgtatttttagtagagacagggtttcaccatgttggccaggctagtctcaaactcctgacctcaagtgatctgcttgcctcggcctcccaaagtgctgggattacaggcgtgagccactgcgcctggccagaaagcagatttttaaatttgaggtaaagaaagcttaaacttaaaaagttaatcaaatgcaatggaagcaaatagaccttcaccattctgatttcccatcaccagaatgaccgatacat

SEQ ID NO: 1011 - DNA, 4050 bp, Homo sapiens
aggcactctaaatcatcatatgtgatcaggcactgtattgtaattgtactgtaggattttctactttaggatcgttgggagtgtttgttaatagagtctgttagaattctaaacaagaatcagaggtgatgtaatctgactttcttaccctgctaaatggcaaccactagtacagctgtcttggtaacagtgggggattcattaggaccttcttcagataccacagatatcaagatctgcagatgctcaagtctctgatataaaatgatatagtattggcataaaacctatgcatatcccccctctatactttaaataatctctagattacttacaatatctgacgctacgtaaacagttgttatatcacattgtttagggaataaggacaagaaaaaaatgtctgtacatgttctatacagacacgatttttttctgagtattttcaatctgcagttggttgaaatatggaacccatggatatggagggctgactgtaattcatcctactaagaggtggagtcttctactgaagaacagaaaagaaatctgtaacagcaaaaaacaaagccaagactatcaaaactaaatgccacagaagttccacattttgtgttgcatttaaaaatacaaagaccggccgggtgcagtggctcacgcctgtaatcctagcactttgggaagccgaggcgggcggacttcctaagctcaagagttcgagaccagcctgggcaacacggtgaaaccccgtctctactaaaatacaaaaaacagccgggtttggcggcgttcgcctgcagtcccagctactcgggaggctgaggcaggagaattgcttgaacccgggaggcagaggttgcagtgagccgagatcgcgccactgcactccagcctgggcgacagagcaagactacgtctccaaacagcaacaacaaaaacacaaaagaccaatacgttagaatcttaactagctttcaaagaaaaaacttactcctgttaacaccaaacagatttgctcccatctataaaacacagtgccactgtgctcaagaggaagatgtcagagacttaggcctaactcggcaagtcttcccagagtagctagtcctctaaaatgatgctttaataggcttaacggaaacaatctcatttacagtgaggcttccaaatggtgaacacggtaaagagcaaatcagcaacattaagtgcacatttgtttgtgggaaggcattaggaaagaggtttttctaagtacagtaattctaaaaatgtgttttcttagggaacaatagtaatatttagactaattgcaaatgttaatatgtgcaatataatttcagtctccatcctacatatacatttttttttaccaccagtactcaaaatgtttatttgtacttctcaattcctatcaatgatttctaatgctggtgtatgaaaagcatgcttgaaattgtttgaaataaaggacttagggacagagtggaatgctggaaatctgtaaaaggactggaaacgctggaatgctggaaatcatggtaggcgcatagccagttattttcgtaggcttctctatctctaattactcagcagaggtggttttattttccttgacagtctgctctaggaagcaatcagccaaccagtttgcaattgtagggtttgtaagaaatgaaaaacactgcacctgcaagtgttttagcatctaccactattcggcttacttacgtaacctccttcccaagaccaagtcagtaggattgtttttaaagcaacctctccatttctaggaggggcacaaaagctagcaaataccccaacccgaatacaagcgaggttgtggagaaagtaatgaaggagtttgtgtgcaaacagcggggaaaggaggttctgttgaattgtaccgtgtgtccgttctcgtgctgtacaggcaatgagtgtagtctgtgcgaaccgggtgtgtgacgtttgcttttcgggtgtacgggtctccgaatgctgcttctgctgtgctcaccaagggagcgcgtgtgcggcgtgtgtctgcgaagcgggcaggttgtgtttagttgtgctgtgccttggaacagtccgtgtgaacagaggagggcttacggttaacagacaaaataccgtaagcgcccttcctagagccaggcacagagacaacggcggcctctggcgccggcacaagggacagcgtggcccggatctcagagcctgggtcactcctcctcccctccagcgacacagcactcccccaacccttccgcccacctccgccgagcctcggctgcactcacctctctccagccgcacgggttcccctagcgccgccatcttctcccttaacctacagacccacaggaaatgacgacagaagggctgaggtgggggggcggggcctaggggaagccggaaaagtgagtaccggctagtatcgcgagatcaggaaggtggccgagtgtgtcgccgcggccatcagggtaagggtacctggacttgcggctttttaggtcggcctggctccgctccttccgcggtgacgaggtcccccggcctcctagggttgggaagagctgctttcctgactctcgttccctgcctcaggcttcccttatcccaatcgcttcgaacccttggctcagcgtagaggagtcaagcctggattctagtcccaccttgcccattagcagctctgtgacctgggactgttcacttaccctctctcagcctcagtttccgcatctgtacaacgagaggtcctatctcttaggtccttacaatttttaaactctgggattcggtggcaattaaatgtgtaatgacatgttgtcagttctcaatttgtgacagcattgctttaaatttaaaaatccacggcttgaatcttccctccaaatctgttaaggggtggaaagtacaaagagcatgaaacatatctgggtgagggagagaacaaggtgctttggtgcaccacaaagtaacaattttataagcagctgattcttataaaatcttaagtaaatgaaatattgtgaagcaaataatattcttaatgcattacagatttttgagccacttctgaaattttcgcgaaccaagaagaattttagtacttggatttgactaacatttatccaagcccttagtctgtactgatactgtggtaggtgtgtttacatccagcatttcaacacttcatgatgggactgttttaataacctgtttgcccctggtccaccctttccattcacctttagtattttcttctccaaatccatcatggatgccaccactatgctcctttttctccccttgaattctgatttcatcatcacaagttctgttcagaaactttcaatggtttctctcctgtttcctatttctaaagccttgcatactctgaccctaactcatccaactaacttcatttctcattaccactaagtgcaaccaccacttcagtccagatagtatagtttcaaccatatttattcctgattccaagtctttttgtttgttttagagacagagtttctctctgttgtccagactggagtgcagtggtgcaatcacagctcaagagagcctcctgtctcagtcttgccagtagcgaggactacaggcaagcaccaccatgcctggcaaatttttaaatttttagtagagatgggggtcttgctatgttgcccaggctggtctcaaactcctgagctcaagcagtcctcctgctttggcctcccgaagtgctgggattacaggcgtgggccactgtgccaggctccaaatcttcatttgtgttgttcttgtgtggaatgcccttcttcatcccttcctagtctccaaactttgtacacactcagttgaacccatttcgtgggtccctgctgaaggcatgccacttctaccaagccttttctccatattattccccttttttgtcctctgatggcctaaatacgttgcagtaacactcaggtgcttatctcttactcgttgtcatttttttttgctgcaaatgtgttcaagaaatgtttattaaacacc

SEQ ID NO: 1012 - DNA, 4043 bp, Homo sapiens
aattctaaacaagaatcagaggtgatgtaatctgactttcttaccctgctaaatggcaaccactagtacagctgtcttggtaacagtgggggattcattaggaccttcttcagataccacagatatcaagatctgcagatgctcaagtctctgatataaaatgatatagtattggcataaaacctatgcatatcccccctctatactttaaataatctctagattacttacaatatctgacgctacgtaaacagttgttatatcacattgtttagggaataaggacaagaaaaaaatgtctgtacatgttctatacagacacgatttttttctgagtattttcaatctgcagttggttgaaatatggaacccatggatatggagggctgactgtaattcatcctactaagaggtggagtcttctactgaagaacagaaaagaaatctgtaacagcaaaaaacaaagccaagactatcaaaactaaatgccacagaagttccacattttgtgttgcatttaaaaatacaaagaccggccgggtgcagtggctcacgcctgtaatcctagcactttgggaagccgaggcgggcggacttcctaagctcaagagttcgagaccagcctgggcaacacggtgaaaccccgtctctactaaaatacaaaaaacagccgggtttggcggcgttcgcctgcagtcccagctactcgggaggctgaggcaggagaattgcttgaacccgggaggcagaggttgcagtgagccgagatcgcgccactgcactccagcctgggcgacagagcaagactacgtctccaaacagcaacaacaaaaacacaaaagaccaatacgttagaatcttaactagctttcaaagaaaaaacttactcctgttaacaccaaacagatttgctcccatctataaaacacagtgccactgtgctcaagaggaagatgtcagagacttaggcctaactcggcaagtcttcccagagtagctagtcctctaaaatgatgctttaataggcttaacggaaacaatctcatttacagtgaggcttccaaatggtgaacacggtaaagagcaaatcagcaacattaagtgcacatttgtttgtgggaaggcattaggaaagaggtttttctaagtacagtaattctaaaaatgtgttttcttagggaacaatagtaatatttagactaattgcaaatgttaatatgtgcaatataatttcagtctccatcctacatatacatttttttttaccaccagtactcaaaatgtttatttgtacttctcaattcctatcaatgatttctaatgctggtgtatgaaaagcatgcttgaaattgtttgaaataaaggacttagggacagagtggaatgctggaaatctgtaaaaggactggaaacgctggaatgctggaaatcatggtaggcgcatagccagttattttcgtaggcttctctatctctaattactcagcagaggtggttttattttccttgacagtctgctctaggaagcaatcagccaaccagtttgcaattgtagggtttgtaagaaatgaaaaacactgcacctgcaagtgttttagcatctaccactattcggcttacttacgtaacctccttcccaagaccaagtcagtaggattgtttttaaagcaacctctccatttctaggaggggcacaaaagctagcaaataccccaacccgaatacaagcgaggttgtggagaaagtaatgaaggagtttgtgtgcaaacagcggggaaaggaggttctgttgaattgtaccgtgtgtccgttctcgtgctgtacaggcaatgagtgtagtctgtgcgaaccgggtgtgtgacgtttgcttttcgggtgtacgggtctccgaatgctgcttctgctgtgctcaccaagggagcgcgtgtgcggcgtgtgtctgcgaagcgggcaggttgtgtttagttgtgctgtgccttggaacagtccgtgtgaacagaggagggcttacggttaacagacaaaataccgtaagcgcccttcctagagccaggcacagagacaacggcggcctctggcgccggcacaagggacagcgtggcccggatctcagagcctgggtcactcctcctcccctccagcgacacagcactcccccaacccttccgcccacctccgccgagcctcggctgcactcacctctctccagccgcacgggttcccctagcgccgccatcttctcccttaacctacagacccacaggaaatgacgacagaagggctgaggtgggggggcggggcctaggggaagccggaaaagtgagtaccggctagtatcgcgagatcaggaaggtggccgagtgtgtcgccgcggccatcagggtaagggtacctggacttgcggctttttaggtcggcctggctccgctccttccgcggtgacgaggtcccccggcctcctagggttgggaagagctgctttcctgactctcgttccctgcctcaggcttcccttatcccaatcgcttcgaacccttggctcagcgtagaggagtcaagcctggattctagtcccaccttgcccattagcagctctgtgacctgggactgttcacttaccctctctcagcctcagtttccgcatctgtacaacgagaggtcctatctcttaggtccttacaatttttaaactctgggattcggtggcaattaaatgtgtaatgacatgttgtcagttctcaatttgtgacagcattgctttaaatttaaaaatccacggcttgaatcttccctccaaatctgttaaggggtggaaagtacaaagagcatgaaacatatctgggtgagggagagaacaaggtgctttggtgcaccacaaagtaacaattttataagcagctgattcttataaaatcttaagtaaatgaaatattgtgaagcaaataatattcttaatgcattacagatttttgagccacttctgaaattttcgcgaaccaagaagaattttagtacttggatttgactaacatttatccaagcccttagtctgtactgatactgtggtaggtgtgtttacatccagcatttcaacacttcatgatgggactgttttaataacctgtttgcccctggtccaccctttccattcacctttagtattttcttctccaaatccatcatggatgccaccactatgctcctttttctccccttgaattctgatttcatcatcacaagttctgttcagaaactttcaatggtttctctcctgtttcctatttctaaagccttgcatactctgaccctaactcatccaactaacttcatttctcattaccactaagtgcaaccaccacttcagtccagatagtatagtttcaaccatatttattcctgattccaagtctttttgtttgttttagagacagagtttctctctgttgtccagactggagtgcagtggtgcaatcacagctcaagagagcctcctgtctcagtcttgccagtagcgaggactacaggcaagcaccaccatgcctggcaaatttttaaatttttagtagagatgggggtcttgctatgttgcccaggctggtctcaaactcctgagctcaagcagtcctcctgctttggcctcccgaagtgctgggattacaggcgtgggccactgtgccaggctccaaatcttcatttgtgttgttcttgtgtggaatgcccttcttcatcccttcctagtctccaaactttgtacacactcagttgaacccatttcgtgggtccctgctgaaggcatgccacttctaccaagccttttctccatattattccccttttttgtcctctgatggcctaaatacgttgcagtaacactcaggtgcttatctcttactcgttgtcatttttttttgctgcaaatgtgttcaagaaatgtttattaaacacctaatatataccaggtgccttgataggaataccaggtagagcaagacaaatgcaaacattgcccttatttcttcaaatattttttctttccattctct

SEQ ID NO: 1013 - DNA, 48 bp, Homo sapiens
tttcctactaaagtagccagaacaacaatgagcatggaaggtagagaa

SEQ ID NO: 1014 - DNA, 33 bp, Homo sapiens
cctcgcttcgcctatgaatccacctgcgcagag

SEQ ID NO: 1015 - DNA, 42 bp, Homo sapiens
atgctctccctctacctcctcccctccaccacgcgtcctctc

SEQ ID NO: 1016 - DNA, 43 bp, Homo sapiens
taccggtgatatgcacttctgacttatttctctccccccaacc

SEQ ID NO: 1017 - DNA, 4048 bp, Homo sapiens
agattttattattaatgtatatgatcctaacaaaacattgtaatactgtttccattttatgattatgaaaactgggcttcaaaaagggtaggtgacaattagctatttgaaaatctctcatcggttagcaaagatcaaaatgattctaaagtagcactcctggaaatgaattgtgagactcatggccatctcaaagagttgtggtcaagatcttgtaagaaaatgtgtatgtaaaccatctgataatgggagacccagattaaatctgggtggtagctataagatggggaggcacaacttcataatggactttggaaccagaaaactttgggtttgaagtttagcttctccacttcagattttctgtgttagtttgggcaagttacttaaattctctgagctctagttttcttaatctatctctgagagttactttaagagttaagtaatatatgccaaatacaaaacaaataacagcactggatgaatgcagagtaaatgtcatcccacatcattataatttcccatggtgtagtaatgacaaacaggaagagtttcagtaatctcttgggttagtgaggtcagaacaggtatcttaagcaatgctgagttaatgaccagaatctgaactttttatctttttcaatggagtgatggattgctagggtaatggggttgtgctggtgatgctaaagataaacgttagagtaatagcaagctcagtcaatagaaacatgcttaccataccctggccttctcagtatttggtcctttccccacttgacagcttgtctaatggcaaatgtgaattttaaaagttttctcccaatgctgatttccttttgccaggaaggaaacaacaatggctaatgttgacatttactaaattaatatttctgaatctatgctgtgttaataagtgcttctcaagtgttctgttgttaaatatgtgtgggaaatgttacacagtagtacttgcatgctttctcaccagtatacatcacagacaccttcatatcacgtcagttttatagatatttcaaaatacattgatacttatcattatttcaaaattataatatttaccttgctgttagatcttatttaatgtattaaaaagcatatatattactatatcacacaatatattattttaaatgtttttataactgtacatcaatgccactggcttcctttgtaatcttatacatttatttcattcacttagaatttttttttttttttgagacaaagtctcactgtgtcatccaggctggagtgcagtggctaatctcggctcactgcaacctccacctcccagattcaagtgattctcgtgcctcagccttccaagtagctgggattaaaggtacatgccaccacgcccagctaattttttttttttggtaaagacagggttttgccatgttggccaggctggtctggaactcctgacctcaagtgatccacccgccttggcctcccaaagtgctgagattacaggtgtgagccgtcgcgcctggccccatttagacatttttatgagaagggtttacataagctttaccagactgccaagagagttgagtccatggcatgaaagtcattacagtgagcaattctttctttctttctttcttttttttttttttttttttgccaggctggagtgcaatggcatgatctcggcttactacagcctctgtctccatggttcaagttagtctcctacctcagcctcccaagtagctgagattacaggcatgaaccactaattttttgtatttttagtagagacagggttttgccatgttggccaggctggtctggaactcctgacctcaagtgatccactcacctcggcctcccaaagtgttgggattacaggcgttagccaccacactgggcatcagagcaattcttaaacattgattatggaagttattggcaagtaagaagtccttagcggaggaggaaggtgaaagcagaagaaatcattgtttcctactaaagtagccagaacaacaatgagcatggaaggtagagaacagtcaattcaagagcccctgtataattagaactccactgtgacttccctttttatttctcaattttttcccacattctctttcttttctctattcactcacactgcaatgccctatcccaaaggctttggatgtttgtgacacctttctgcaatcacctaatttgtgtattttttccccacagtaaccttgttacttagagacaggaggtggttgatatatttccttgaagcgggaggaatcaattctaactccttttggtactgatgagcatggtgctacaaggaaatttctagatagcataacattataacattcactctgggaacaaagatctcagagcattttctgccgctatttaggaaaattgttggatcacctttcccaggttgcgaagattttggagtggatttaacattcactcaaaggttaaaaactttgacaaagtacattttacttcctgtagtggtctgggaaatgcccagagtggatcaaaatgtcctatacaagctacagctttctcccagcttcaggctgaattcttaaatccagaggttgcatgttactaaactgctggtttttagacactagactttaaagattttttatttttaaattaatactttgtaatacattttgccatttgtctaaaatagaattcaagaatgatgtctgttatgcctagtgcatcagaagttattttaaatatgacatctttataaaagtcaatagctgcctcatcaaagggcaatcatgtctagtgtgggtggctgtgccaattgtttttgaactactgcagcaatctagccaatcccagggaatggcttgcagtctttctacacccacattttttttcttaattatctccaccaggctgagttagttaaggacagatctatagcatttcctggatgtcaaaatgcccacacaccttctgcaatccttgggctacctgcttcctttcatgtttcttttggcttgtccatctaattatctattatcatgtgtatataatgcattattcatgagacccaggcaatttcaggatgtaatatttttgattttaaaaggaaatgacctgaaaaattataacttctgcttgcacaaagaaaataagcagtaaatttgatagcaggtcttccatcgcaccacctgcttttaaaaataatccgcagaaatttgagatcattctctaaattaaaactttcctagccatcattccataaatgaacaggttcaacacctagattccttctattctgggttcaaatatgttactttgatttttttcatgatatacttcttaacaagttaaaaatttgcggtacccacccagaattgtaaatcaccaaaggttagggtaacttaggccttaatttcccctacactgcaagaaatagttatagactatatcttttatatcactcaaacttggaacggaagtggaatttagagtttattctgagaacatctcttttgttttatgtgtgaggaagcagagatcaagagtgactgattgacttttttgggtactgacaagcggttggaagtaaagcctaaactcaggcttttaatcttattcactgtgttctcttgaaaaaaggaatcttatgagtccagaggtctgtccccttctaaggattggagcaaataaagagaccagtctttgtctctaggccacaagatccaccaagatagggaccatttggtcttgcttgttcttgaatctccagattgtaatacagttcctggcacataatggcaaattatgtgttgccaattaatacttacaaaataaaattatgaatgctagagtctctatagaaagtataccttttgggcaaaatgggaaatgatcagccaagctcatgatccacataagtatcagaacatctaccaagataaacaagtacccagtgtccaagactgggatgaaattccagaggattgaaacaaaacaagccagcatgaattcatgtatcagatatgagctgggctaa

SEQ ID NO: 1018 - DNA, 4033 bp, Homo sapiens
ggcctttgagagaagtatatttaataaaaaatatgctcagttagacatcattttaactgacagattgtaagcaatatgatcgagtgaatgttacttgagcaagtttgagcctggtcccaaaattacagaattacaaaataaaaaccctttgtaagtcatgctttaatgctggttttccctcatttctgtttcttggctgattatctattttgtggtcatccagtcccttgccttctctctcgctcactgcctgattttggaatgttgtttcttactaaagcttcccctagaggacaggccaggaaaaggaaagaaactaaattcaccagcttctcttcttattaagaatttagatcagaaatctgatagggaaagagtctggcaaatgaaaggggaagcttatttatgttgattttagatctttaaaagccttctttccaatgtacattaatagacaattgaaaaataatattttataagccaactaatcacttgcttttaaaatccccacttactaccttgagcatatacattagattatgttttaaaataactagtactctggttcagtgaaatgaaaatgatatgtgcaaagagaatgtcataatgatacctcccatttatggagtgcctgcttcccagtttgcaaagcccttatatatattctcttctatcctccaaaaattgctgtgttgtaggtcttactatcaatgacactgaaaaagctactggcaggatgctcatattctcatctgaatcaatactggtatactccattgggggagctagaccaagctaaaatctcacatacagaaatattaatatgcaagaccaaggggtataaaagtaggctaggttactgttaatttaatagcatctaggttaaaattctctctctttcctctttcttcccttcttctctccatcaccttctagtcttctgactgattccaaacaggacaattgaaatgtcttgccttcatgctgaagagctctttgtaaatacacataaacagtgaatatcaggtgcaccatttttaaagtgctattcatttccacaacagtttaggtgaaaccatgtcatcttacaagttgagtgtgtgtgtgtgtgtgtgtgtgtgtgtgtgtagaggatgacgtgacacttttgaggtttatttaagttgttaaagacctcaaggttacaagacttagactgttaagcatttttcctcccagagacacgaaatctacaattttctcgattcaactgtcaactaaattggcaagtcaactaaaaggataatattcccttaacgatgcattcatttgaagccctagcaactgtattaggcagcagcgagtattcgctagcaagggatggcgcggggagagggaactctgcaatttagagtgacagatgatttctttcccatccatcaagctgcctcaaaatgtcacaatatttacacctctttcttggtgaattagaatccagagacaagcagacagaaagaaaaaaataataattccggccggttgccgcctgattggaaaaagcaagcgttgcacctttaaattctgctcctccattccccgttccgcacaccacccccccccgcccctcccgggattttgcaataaatctcccagttctgcgttcagccctgcagatccgtatttaaaacagcaccatctgggaagggtgggtggcgatggtgatgcgggcgccttggagttcctttgcagcacgcttggaattgcatcagactgatcagaaatccccccgcccccaagctcagcccctcccgccacgctcccctgcccgcccctcccctcccctcccttcgcgtagatctgactgagaaaacgactggatctcggaacaatctgtgccccattcgctgcaggcttgctccgtaaaccctgccctacgctccctttgtgtgccgagcagcctatcaccgtcatctgatcctagcgcctgttttttatcttttccttctgaatttccacaatatcctcgcttcgcctatgaatccacctgcgcagagttgggattctttctttcgttcgttaaaacagtggtcttgagtttcggaaacagatttttcctacgttcccctcacccctaccccaagctcttgccttttaattaagaagagctgatcgggggaggagtccagaacgaccaaaccctggggcgaaaactgccaccgggcttggctctgtggccggaacaaaaggcctgagaagggggtgggggtgagggttataggagtgtggagagcctggtggcccccgcccaggggcgcctaagtccctgagctccctgaagagtggcaagaggataacgcagccgcgcgttccggcagttcgctgtcccccgggggtgcaggcgggggcgggagaggtagaacacaggtctgggcggctccgcgccgcttctatctcacccgccaagcccctcacctccacccaccgccagtcccctgcccacccgggtggcggcggcggctcagcgactagccggccgccctccaccggcgcctccggacgcaacctcgccctggcagggcggtctgcgcgtccagctgattggtggctctgtccagccgccgcacggagctaaaagtgttcttctccaccgcctccagccgcccaggccccctcgcccggcccgctctctggctcttcggtccggaaaggaccttctactcccaggcggaggctcccctttccctgagttaccccgactgactcggacctgggctcagtgaggcatccggcccggctggggagcggagcgcggtctcggcagctccccttcccttgagaaagcgggaaccctctaagccagcgcccgaaactcgcggggagggaggacagaagggaaaaaaaaaagaaaacccagaaagaagcatccagcgaggagcgagggcgacggagaggaagagatagaatgagggagggatggaggctggaggagggggcggggtggaagaaggggggcgggaaggagggagggagggggaaagagagggagggagggatacagagagaatgaatccttctcactagaagagctgaaattaccttgattcatttttttgtgttggaggtttagctttacctccttccctcttcccaacctccacctcctctccccaccgcacaccacctccaccgcctgattctaaatgctacaaagtcaaattttaggaattcgaatgttttgcaaaagcttcataattagtaatgaatctactgtacacacacacacacacaccagcaaagagaacggaaaagagggaggtgaagaggagaaaaagagagataaatcttacatttgaatcagacatttgcaggtccaagttaactaaactcattatatccgcaggaagactgagtttcttttttttctttctccctttgccccagggttctcacctagggcaattcaaactgggcaaataccaagaaacaaccccctctcatgctctccctctacctcctcccctccaccacgcgtcctctccggaagacagtatcaaaatagctcaagaattggggatgcaaggggtccccgccctggtgcttaccttctttgcggcttacaccaccccggtggctagatcctggagataaacacttgcatttcccaaagttaacccagtataccaacccggagcttgccaagagtctattccagcctacaccgctaggaagccaacttcagcgagctcaatgaggggaccaaactggggctcgctttccaaacgctccgctccaaaatctgactctctctccagccccgatctcagtgtgagccgaacctcagaaaagacgctttttaagggcgacacagggttggctttacagcggggccaagaagactacctgggggtaccgccacctcggacaaatccgttggctctgtccaaggtgctgaatggactcctatcgcccggattacacacccggcacagcaggaggaaaaggcttaaaaatctctaattaagtgatacttgatattgctctagacggtttcttc

SEQ ID NO: 1019 - DNA, 4042 bp, Homo sapiens
agagacaagcagacagaaagaaaaaaataataattccggccggttgccgcctgattggaaaaagcaagcgttgcacctttaaattctgctcctccattccccgttccgcacaccacccccccccgcccctcccgggattttgcaataaatctcccagttctgcgttcagccctgcagatccgtatttaaaacagcaccatctgggaagggtgggtggcgatggtgatgcgggcgccttggagttcctttgcagcacgcttggaattgcatcagactgatcagaaatccccccgcccccaagctcagcccctcccgccacgctcccctgcccgcccctcccctcccctcccttcgcgtagatctgactgagaaaacgactggatctcggaacaatctgtgccccattcgctgcaggcttgctccgtaaaccctgccctacgctccctttgtgtgccgagcagcctatcaccgtcatctgatcctagcgcctgttttttatcttttccttctgaatttccacaatatcctcgcttcgcctatgaatccacctgcgcagagttgggattctttctttcgttcgttaaaacagtggtcttgagtttcggaaacagatttttcctacgttcccctcacccctaccccaagctcttgccttttaattaagaagagctgatcgggggaggagtccagaacgaccaaaccctggggcgaaaactgccaccgggcttggctctgtggccggaacaaaaggcctgagaagggggtgggggtgagggttataggagtgtggagagcctggtggcccccgcccaggggcgcctaagtccctgagctccctgaagagtggcaagaggataacgcagccgcgcgttccggcagttcgctgtcccccgggggtgcaggcgggggcgggagaggtagaacacaggtctgggcggctccgcgccgcttctatctcacccgccaagcccctcacctccacccaccgccagtcccctgcccacccgggtggcggcggcggctcagcgactagccggccgccctccaccggcgcctccggacgcaacctcgccctggcagggcggtctgcgcgtccagctgattggtggctctgtccagccgccgcacggagctaaaagtgttcttctccaccgcctccagccgcccaggccccctcgcccggcccgctctctggctcttcggtccggaaaggaccttctactcccaggcggaggctcccctttccctgagttaccccgactgactcggacctgggctcagtgaggcatccggcccggctggggagcggagcgcggtctcggcagctccccttcccttgagaaagcgggaaccctctaagccagcgcccgaaactcgcggggagggaggacagaagggaaaaaaaaaagaaaacccagaaagaagcatccagcgaggagcgagggcgacggagaggaagagatagaatgagggagggatggaggctggaggagggggcggggtggaagaaggggggcgggaaggagggagggagggggaaagagagggagggagggatacagagagaatgaatccttctcactagaagagctgaaattaccttgattcatttttttgtgttggaggtttagctttacctccttccctcttcccaacctccacctcctctccccaccgcacaccacctccaccgcctgattctaaatgctacaaagtcaaattttaggaattcgaatgttttgcaaaagcttcataattagtaatgaatctactgtacacacacacacacacaccagcaaagagaacggaaaagagggaggtgaagaggagaaaaagagagataaatcttacatttgaatcagacatttgcaggtccaagttaactaaactcattatatccgcaggaagactgagtttcttttttttctttctccctttgccccagggttctcacctagggcaattcaaactgggcaaataccaagaaacaaccccctctcatgctctccctctacctcctcccctccaccacgcgtcctctccggaagacagtatcaaaatagctcaagaattggggatgcaaggggtccccgccctggtgcttaccttctttgcggcttacaccaccccggtggctagatcctggagataaacacttgcatttcccaaagttaacccagtataccaacccggagcttgccaagagtctattccagcctacaccgctaggaagccaacttcagcgagctcaatgaggggaccaaactggggctcgctttccaaacgctccgctccaaaatctgactctctctccagccccgatctcagtgtgagccgaacctcagaaaagacgctttttaagggcgacacagggttggctttacagcggggccaagaagactacctgggggtaccgccacctcggacaaatccgttggctctgtccaaggtgctgaatggactcctatcgcccggattacacacccggcacagcaggaggaaaaggcttaaaaatctctaattaagtgatacttgatattgctctagacggtttcttccacttccttacggtttgtcacgtgcggatggctttgccaaagccatcctgttaatagttgatcacatgttgatgagaaccttttcttctacgagaggattacccattaccggtgatatgcacttctgacttatttctctccccccaaccccaccccccatctacacctaaactcccagtctttaccccacccttacccccactccaccccctaaccccaacctctaacagcattattgtttttagatggaaattaacccccttgcaaatgtcaattacatgcccacatataaatcatagaatatgatcatacaccatacacattaaggaaaagaatagaatgcaagactgctgagagacaagcatcagccttgaacaaccaatataacacacacccccccacccagctccaagtttgttccacgcagttccacatagctgtgtcaaatctcaaatgattccaattaaagttgcactgtgtaaaaacccgattcccctggcctgagtagctgctgttctttggcgtgtgaagtgctaggaagagccgtgatatgcccgttgttaagcaacatgtcaagatttttcaattataatgcaggttttattgctactcaccattgtgcctttgctgtcctggagactcaagtgtcttaaaatctcgtctccccaacagatgctggaaggtaatgtgtcttgtttgaagtcatcatgtgagaagttcggctttgctcagtggatcgcccaccacttggtgtgacttatgaatctaataaccctttgcaatatccgcaagcttaaactctcaaccaccttggcgactacagaagacaaagcaactggcatcgatgtcgaaaaacctatagatttacgcaaacgccctcactccgagagacacgtttccttttgagttcttacgtgattctaatgaatgagcgaggttaccaatgattgcccaactgccctgctatgtagcaggtgtttcctagggctgccttctaaccgcccgttactgggtcctggcactgaaagttcccagagaaagtgaggagtttcagggtacccctgtaaaaaaaaaaactcagcctgcacaccgctcccttgcccactacgcaggtcacacctggggctccggcgaagctgaattcggctcgggagatttccctgtcgccaggtaagaaaaccttcgccttgtcaggctagggcgggaagaccgctggggaacttgttgcttatcagcgccggcagactaccgctttaataataataccagaaaagcgcagcagggagggggtggggggcggcaacggcgacgactaacctcgctgtttacgtgaccgactcactgtgactctctgggtaaaaaaaggaaacttcttagaaaagttcgtgcccctccccctcccccatcatgactaagggtctccagccgatgaggtcgtgagtgatgatcaaatggggactggggggaggggggcgagtaagtga

SEQ ID NO: 1020 - DNA, 4043 bp, Homo sapiens
aagagctgatcgggggaggagtccagaacgaccaaaccctggggcgaaaactgccaccgggcttggctctgtggccggaacaaaaggcctgagaagggggtgggggtgagggttataggagtgtggagagcctggtggcccccgcccaggggcgcctaagtccctgagctccctgaagagtggcaagaggataacgcagccgcgcgttccggcagttcgctgtcccccgggggtgcaggcgggggcgggagaggtagaacacaggtctgggcggctccgcgccgcttctatctcacccgccaagcccctcacctccacccaccgccagtcccctgcccacccgggtggcggcggcggctcagcgactagccggccgccctccaccggcgcctccggacgcaacctcgccctggcagggcggtctgcgcgtccagctgattggtggctctgtccagccgccgcacggagctaaaagtgttcttctccaccgcctccagccgcccaggccccctcgcccggcccgctctctggctcttcggtccggaaaggaccttctactcccaggcggaggctcccctttccctgagttaccccgactgactcggacctgggctcagtgaggcatccggcccggctggggagcggagcgcggtctcggcagctccccttcccttgagaaagcgggaaccctctaagccagcgcccgaaactcgcggggagggaggacagaagggaaaaaaaaaagaaaacccagaaagaagcatccagcgaggagcgagggcgacggagaggaagagatagaatgagggagggatggaggctggaggagggggcggggtggaagaaggggggcgggaaggagggagggagggggaaagagagggagggagggatacagagagaatgaatccttctcactagaagagctgaaattaccttgattcatttttttgtgttggaggtttagctttacctccttccctcttcccaacctccacctcctctccccaccgcacaccacctccaccgcctgattctaaatgctacaaagtcaaattttaggaattcgaatgttttgcaaaagcttcataattagtaatgaatctactgtacacacacacacacacaccagcaaagagaacggaaaagagggaggtgaagaggagaaaaagagagataaatcttacatttgaatcagacatttgcaggtccaagttaactaaactcattatatccgcaggaagactgagtttcttttttttctttctccctttgccccagggttctcacctagggcaattcaaactgggcaaataccaagaaacaaccccctctcatgctctccctctacctcctcccctccaccacgcgtcctctccggaagacagtatcaaaatagctcaagaattggggatgcaaggggtccccgccctggtgcttaccttctttgcggcttacaccaccccggtggctagatcctggagataaacacttgcatttcccaaagttaacccagtataccaacccggagcttgccaagagtctattccagcctacaccgctaggaagccaacttcagcgagctcaatgaggggaccaaactggggctcgctttccaaacgctccgctccaaaatctgactctctctccagccccgatctcagtgtgagccgaacctcagaaaagacgctttttaagggcgacacagggttggctttacagcggggccaagaagactacctgggggtaccgccacctcggacaaatccgttggctctgtccaaggtgctgaatggactcctatcgcccggattacacacccggcacagcaggaggaaaaggcttaaaaatctctaattaagtgatacttgatattgctctagacggtttcttccacttccttacggtttgtcacgtgcggatggctttgccaaagccatcctgttaatagttgatcacatgttgatgagaaccttttcttctacgagaggattacccattaccggtgatatgcacttctgacttatttctctccccccaaccccaccccccatctacacctaaactcccagtctttaccccacccttacccccactccaccccctaaccccaacctctaacagcattattgtttttagatggaaattaacccccttgcaaatgtcaattacatgcccacatataaatcatagaatatgatcatacaccatacacattaaggaaaagaatagaatgcaagactgctgagagacaagcatcagccttgaacaaccaatataacacacacccccccacccagctccaagtttgttccacgcagttccacatagctgtgtcaaatctcaaatgattccaattaaagttgcactgtgtaaaaacccgattcccctggcctgagtagctgctgttctttggcgtgtgaagtgctaggaagagccgtgatatgcccgttgttaagcaacatgtcaagatttttcaattataatgcaggttttattgctactcaccattgtgcctttgctgtcctggagactcaagtgtcttaaaatctcgtctccccaacagatgctggaaggtaatgtgtcttgtttgaagtcatcatgtgagaagttcggctttgctcagtggatcgcccaccacttggtgtgacttatgaatctaataaccctttgcaatatccgcaagcttaaactctcaaccaccttggcgactacagaagacaaagcaactggcatcgatgtcgaaaaacctatagatttacgcaaacgccctcactccgagagacacgtttccttttgagttcttacgtgattctaatgaatgagcgaggttaccaatgattgcccaactgccctgctatgtagcaggtgtttcctagggctgccttctaaccgcccgttactgggtcctggcactgaaagttcccagagaaagtgaggagtttcagggtacccctgtaaaaaaaaaaactcagcctgcacaccgctcccttgcccactacgcaggtcacacctggggctccggcgaagctgaattcggctcgggagatttccctgtcgccaggtaagaaaaccttcgccttgtcaggctagggcgggaagaccgctggggaacttgttgcttatcagcgccggcagactaccgctttaataataataccagaaaagcgcagcagggagggggtggggggcggcaacggcgacgactaacctcgctgtttacgtgaccgactcactgtgactctctgggtaaaaaaaggaaacttcttagaaaagttcgtgcccctccccctcccccatcatgactaagggtctccagccgatgaggtcgtgagtgatgatcaaatggggactggggggaggggggcgagtaagtgacttgtccttgggaacatctgcatgcgtcgaagcgcgaaccagcccaacaactttcccttttcctcttaggtactgatgactaggcgagaggcaccaaggcgagccactagttgcccacaggaacctgtgtaagccgagctctcgagcggctgagttgaatgaagttatgactgcgtttgctctaatgggttatggcttcccaaatgtgagttaacagccccggtgcgcagctaggtcggaaggcgagccgcggagagcggagccgcgggccaaggcagggacgggaggggaggcggcaggttgggcgctccgctgctgctcggtgctgcttccccggagccgcttcctcatcctgcgggggctgccccgccgccggggtgccggggtgagcgcggcgggagccagggctggggtggcgaacctcggagggggctctcccaggaagccctgcggttagcgcccgcgcttccccaccagtggctgcgcaagctgggaagcgaagaggtcacgtgttggcggaaagtaacttggaggcgaaaggatgaactttgagaagaggaaaaaaagcacaatgaaacaaactacccccttggagtgtctaatagagggggaggcgggagggggggcggaggggcgccgctctccgcgggagatgtggggacgac

SEQ ID NO: 1021 - DNA, 39790 bp, Homo sapiens
tgtaacagactggaatttttaaaagcacacagagccctttgctgcactaacagcaatggacatgtctaccaggtccaaaaaaaaaaatggtcctacacaatctgcggtggtgtattttcacacttttaataatacacacctatgcattccgtcttggggtgtgtgtgtctgtgtgtgtgtgtgtatgtgactaacttaacacactgaacgcattacaatgcattaaaaagttcttcagcagacttctctgctttagcctctgctatggtctaaatgtttatgtccccgccaaattcacttgttgaaatcctaacccccagggtgatgatggtgttagaaggtggggacatagggaggcgatcgggtcatgagggcagagccttcatgaatgggattattatccttataaaggaggagagacttccttgccccttccactgtgtaagggcacagtgaggaagcaccacctatggaccggaaagaaggccttcgctactggtgtcttgatcttggacttcccagcctccagaactgtaagcaataagtttctgttgttgttgttgtttttctgagactgagtctcgctctattgcccaggctggagtgcagtggtgtgatctcggctcactacaacctctgactcctgggttcaagtgattctcatgcctcagtttcccaattagctgggattacaggtgcgcgccgccacgccaggctaatttttgtatttttagtagagagggggtttcaccatgttggccaggctggtcttgaactcctgacctcaagtagtccacccgtctcggcctcccaaagtgctggaattacaggcatgagccagtgcgtccggccagtttctgttgtttataagccacccagttcatggtattttcttatagcagctcaaatgggctacaacagcatctctgattatcctataacaatatatccgtttctctatgggaatccatttctgtgcgagaatatgtaagaacctcagatgtttcatgccattgctgaacagaggagtctcctgggttctggacacttgccttgggaagcacatcacttggttcctctcaaacgcatttgaccactgaatagccagccactcactatggaaacacagcccgaagcactctcaatcttttggacctcagcccttttctggatctatgaaaatgtccatactggatggtgctggcaggttgcgaagtgcccaaacctcccacgcttcacaggaggaaccctctgcaaatcttacatggcaggtgggtgaccagaggagccattccaataccagtcattgctggatgtttctggggtgctgtcccaggtgctgtggagcatatctactctgtctagtctgtctttccattccagtccagtggatattgtgtcttcttcttcaggtccttgttcactgtagctgctcaggaaatagttgtgaaatggattgttgttgtggtacattcttaaagtcccttgaaagtaagaaaataaacgaatgactcttctgtgggtaaaactttggtcatcttttcacttgtttagatgagaaagaatacagaacaatgagattatagtctcctaaaacttttggaaaaattcttcatgtcctctatagtgttataattttgctattgtcccccaaagggactcaggtaacatgctttggatggaatggtgggattaaaggcacctttgattctgcacatttggtggtgttgtgaatacaaactaaacactagctgtgcagtatgcaatatttaaaggaagtagaaatcatccaaatcagcatttccagagtttttcagaacaagcaagagaatacaagagatcagcagttttctccctcaagttgttctataggaaaaaaaaaatttatccaggctcaaagaaattctataggaaggaaatctgcatacttttgctaaccccatcatttcccagactctttgaattcagtaggaagaccgcttgctccacacagttattcaaggtccccaagattcttctatctgggttttccatcatgccctagaacaatgtctttatctgcatggtcaaaactgacttacagtcgtatctgtggtcacagataggggaaggggactgaggattacatgtgcaatattttaagactcaacctgcaagtggcacacatcactttctctcacattccattagtgaaaacttaatcatgtggtcactcctcccttcaaggaggggtaggaattgtggtccctaatggggaggccatttctacattatttctgacagctacaagtctgttaatgtgtatcatagttgtcccaccagcctgcaacagagcaggggctagaagccaggtcttccaactcctagtccagagttcccattaccacactagtatttctgtacagtaagtcctcacttaatgttatcagcaggttcttggaaactgcaattttaagtgaaatcatgtataatgaaatcaattttgaaatttctcatcaatgttgtaactgagtaacgttatttgaggacctgcttacataattttgcttgaagtccaagtttccaagaacctattgatgacattaagtgaggactgactgactgtgttcagccaacatatatggagtcctcctgtgtgccaggctctatgtcaatatgagagtggaaagtcctacaaaacagaatcccctaattatatatttactctagtatcaagctttattaatggataaacgttcagatagctttgtaaagctatcccaaattatctgatagctttgcatgatgttcctttcatttgccaagaacatacatattcttggtgagggattaacacatataatgaacagagtagagaatcctgaaagagatcccaatgcatttgaaaaatgggtatatgaaaaagtcatttaaaaaatagaaccaaaaagataaatatacattaaaaaggagggtgttgagtccactaactaagaatatatatatatatatatatatatatatatatatatatatatatatagctagatttccctttaattccctcttgaagaaggaattgcttatgcaagactccaaagctgagaaccagattgtctttcagttgtcatgcagcctggaaagcccccaccttatgtaccaatagattgtgaagcaatcaaagactactacatacactttaaagccaaccagaaagactccttcccttccaagtatcttttacccgattggaactagaatatgtcaccatgaaagaacactcaccaaagattggcttaagtcttcctccttttagtctgtaaaacttactcttctaggctggcgcagtggctcacgcctataatcccagcactttgggaagctaaggcgggtggatcacctgaggtcaggagttcgagaccagcctggcaaacatggtaaaaccccgtctttactaaaaatacaaaaattagctgggagtagtggcaggtgcctgtagtcccagctgctcaggaggctgaggcaggagaatcgcttcaacctgggaagcggagcttgcagtgagctgagatcgtgctactgcactccagcctgggcaagagtgagactccatctcaaaacaaacaaacaaacaataagacaaaaaaacttactctcctttcaaaccccttccaacctctactataatgaaaatgatggcagctgactcccttataacagtaagttttgaataaacagcctttgattaattctattttgtttgccaaagaaaataattaaagtttggtaaaataaaataattaaaagaaaaagaaatcatggacactctagaagaaaacatttatttgagctttactgctgaaaaagaaaacatattttaaaaagtaaccttgactgcacagcaaaagaaactatcaacaaagtaagcagacaacctacagaatggaagaaaatatgcacaaactatgtatctgacaaaggtctaatattcagaatctataaggaacttaaatcaacaagcaaaaaacaaataaccccatttatggcctttgcttactttttgggcagtcctcaaaagaagacatccaagtggcaaacaatcatatgaaaaaatgcttatcatcactaatcatcagagaaaagcaagtcaaaaccacagtgaagtatcatcacacaccagtcaaaatggctattattaaaaataacagatgttggcagtgctgcagagaaaagggattgcttatgcactgttggtgagaatgtaaattcatttagctactgtggaaagcaggagatttctcaaagaactaaaaatatatatatcattcaaaccaacaattccattactagatatatatccaaaggaaaataaattgttctatcaaaaagacacatgcacctgtatgttcatcgcaatattattcgcaatagcaaatacatggaatcaaccaaggtgttaatcaacagaggagtggataaagaaaatgtggtacatatacaccatggaatactatacagtcagaagaaagaatgaaatcatggcctttgcagcaacatggatgcagctagggaccattatcctaagtaaactaatgcagaaacagaaaagcaaatgccacatgttctcatttataagtgggagccaagtgagtacacatggacatgaaatggaaacaatagacactggagactacaagagaagggagggggacagggattgaaaaactacctattgggtactatgctcagtacttgagtgatgggttcaatcgtatgcaaatttcagcatcatgcaatatacccttgtaacaaacctgcacatgtaccacccctgaatctaaaataaaagttgaaaaaaacaaaaacaaaaaaaccccttggaatgggaggagtcttttcagaccaaacatgagacccagaagacaaaaagtaaactgttaataagttaggctgcatagcaagccaaaatttttatatgaaacattttttaaagtgaaaagatagataaattttcaaaacatataacaaagaattaatttctttggtatacaatgagcttttaaaaattaataagaataattcaatgagaggttgaaatgggtacaaatatagagttaggtagaagcataagacctaagtgtttgatagatcagtagggtgactatagttcaagataatctattgtacctgtcaaaatagctagaagagaacaattcaaatgttcctagcattaaaaaagataaatattgccggtgatgaataccctaattactttttttttttccagacagagtctcattctgtcacccaggctgaagtgcaatggcgcaatcttggctcactgcaacctccgcctcctgggttccagtgattctcctgtctcagcctcccaagtagctgggattacaggggcccacagccatgcctggccaatttttgtatttttagcagagatggggtttcaccatgttggtcagactggtcttgaactcctgatctcaggtgatacacccacctcggcctcccaaagtgctgggatgacaagcgttagtcactgtacccgacctccttagatctttacacattatatgaatgtgtcaaattattacatgtatcccaaaaatatgtacattatgtgttaataaaaagattttcaaaattaataagaataattcaataaggaaaatggacaagggaagaaacacacaattccaggaaaaaatacaaataatcaataaatatatgatacatttaatcacatataatagaagaaatacaaataaaaataaggcacttttaacacaatctattagaataccagatatttaaatttgacagaattgagtattgttgaggatatagagaaatgggcactctcatcctacattgggagaaatataaatcaatactggattcttgagattcagtttacaataagtacaatttaagatgtgcatatctctttaccctgcaattccacttctagaaatttatcctaaatatttacttacaaatgagcaaagacatatatgtacagggatgttcagatttttatgtcgggtttttgtacggacatagttttttttttttttttttttttttttgagatggagtttcactctgtcgcccaggctggagtgcagtggcgtgatctcggctcactgcaacctccgcctcccaggttcaagcaattctcctgcctcagcctcccaagtagctgggattacaggcatgcaccaccacacctgggtagtttttctatttttagtagagacagagtttcaccatgttggccaggctggtctcgaactcccggcctcaggtgatttgcccgccatggcctcccaaagtgatgggattacaggcatgtgccaccgagcctggctatatggacatagtttttagttctttgggataaatgcccagaagtgttactgctatttaatctttaaagaaactgccaaactacttttcagagtggctgcattattttccattcccaccagcaaagtatgagtaatctatttttacgcattctttcccaaatttagtattttcacttttttttttttttttttttttttttttttttttttttttttgaggcagggtcttgctcagttgcctaggctggagtgtagtggcactatctcggctcactgcaacccctgcctcccaggcttaagcgatcctcacatctcagcaacctgagtagctggggctacaggtgagtgctaccactcatgggtaattttttttgtattcttagtagaggtggagttccgccatgttgcccaggctggtctcaaactcctgacctcaagcgatccacctgcctctgcctcccaaagtgctggggttacaggcgtgcaccactgtgcctggccattctcactatttttaattcaaaatagtttgtgttctctattctccacatctttttgttctttttaatcatctaaagtccatagtttgtattaggattaacttactgttgtacattctctctctctctctcttttttttttaatgagatggagtttctctcttttttgcccaggccaagcgcaatggcacaatctcggctcactacaacctttgcctcctgggttcaagtgattctcctgcctcagcctcccaagtagctgggattacaagtgcgtgccaccacacctggccaattttgtatttttagtagagatggggtttcaccatgttggccgggctggtctccaactcctgacctcagctgatctgcctgcctcagcctcccaaagtgctgtaattataggcataagccactgtgcctggcctagtgttgtacattctgtgggttttgacaattgtatgcatctacatgtatgtaccattatagtattcctgtttttaattttagccattctagtaggcatgtagtgatatctcatggtgattttaatttgcgtttccgtaatggttaataatgctgaacatctttgcatgtgcttgtttgtcatttgtgtttcctacttggtgaaataattgttcatgtcctttgtccattttctaattgaatttttttttaccatttagttttgagatttctttatacaatctagatccaaatctcttgtctcaaatatggtttgcaaatacattcctctaattcatatattgccttttcctcctcttaacaggatgtttcacagagcaaaagttttagttttgttgaaatctcacttttcatttttttctttagtggattgtgcttttgttgtcatatgtaagaactcttcactggccctagatccttgtattggtttcctaagattgccatagcaaatcaccatgaacttagtgacaaaaagacagaaatttattttcacttcctactgtgggcagactagacgttaattattttcatgtatgctcattcctatgacatctttctgatataataattatagttattcttaagcttcacccttttttctattagctttgttaccttgggtgtcactttttcttttttgacattgtgacctatgccagatcatgtctgttagtacttagccctccattcacctctccataatcccttttgtattcctggagcttgatgcctgaaatgacacatcctacattcctttgccagatgggtaccagttagcttgtgcacatgggagacaaccgtgaaaagactgaagtggggaagaagggaggagctgttgtgtttcagtgagcgcccttggcagtggcggtgacagtggctcctgttcagtggcaatggtggagcagctagcaagacatgcagtaagcgcaggctcataggctatggtccaggagcagtcaccgattcctggtctttaggcaatatcatctccctttgcttctccagcctttctaaaattattgtaccttgactagtacaattttttagtattgggggtagtccaaggacacaggctttaaaaagtatgaattcagggttgcctacctgcattgactgcgcttgaatcatgatggccttctggtcggtggcaggaggtgacagtccaaatcatgcagtagcaaaccagatacttaaattatcatctgagatacttcagaagtacagccgtagccataccttcagaagagataaagaaatgttctcctggccaggcgcggtggctcacgcctgtcattccagcactttgggaggccgagggggtggatcacctgaggtcgggagttcgagaccagcctgaccaacatggggaaaccctgtctctactaaaaatacaaaattagcggggcgtggtggcacatgcccataatcccagctactcgggaggctaaggcaggataatcgcttgaacctgagaggcagaggttgcggtgaactgagatcatgccatagtactccagcctgggcaacaagagtgaaactccatctcaaaaaaaaaaaaaaagaaaaaaagataaagaaatgttctcctttcttgccatttctaggggtttggggatggcgtacattgctgcagggcgtgctcactctaccatcttgctccaatctttatttttcaaaatacagtgcttatgcttggttacttcagttaagattatttttaaaaatcataattaagcaaaaatatatggccatgcttaaacatatttaagataaattaagtgatttggcctgtttcagtatcccaactcacatgctaacaggggcttgacctgtagctacggtaccctggaggaaatgatcgcatttatttggttatttcggtctaagtagtaatagttctgtcctgggaaaaagactagcctcaaggcatttctgattgaatgtttttcaattacagtctttaaaccagtatgccacagaactggctctttccacatgacggcctttgtggtgggtggcagattgccctgaggcctcgcaaaatgctaggctttcacaatgtcactgactgacagccaggcccagcacagtcttggtgtgattgtggggctaaagttattccaccttgtgcaatagctacagctttctctaaccagctgcattcttataaagttagaagaaaatacttttttttttttgagatggattctcgctctgttgcccaggctggagtgcaatggtgcgatctcggctcgctgcaacctccgcctcctgggttcaaacgattctcctccctcagacccccgagtagctgggattgcaggtgcctgccaccacgcccggctaacttttttgtatttttagtggagacggggtttcaccatcttcgtcaggctggtctcagactcctgacctcaagtgatctgcccgcctcagcctcccaaaatgctgggattacaggcatgagctactgtgcccggccaaagaaaatactttttatgccagccctgaaactaccctgaagcacatacatcaaccttgaggcctcacactccatcaagaggggtgaagggcatgaggaattagaaagcatagggatttttagttagacagatctggttcaaatcctagacttgtgccttgaacaaattatttaccctcattgaactctagattcattatttgtaaaatgaaagacaataatagttatctccaaaggaaagttgaatatgatcattcatttattcattaattcaacatttattattgcctactttgtgccaggttctattctaggaactaagggatacaactttgaataggcaaaatctctgctctcctgaagtttacttttttttttttttttgagacagagtttcactcttgtcacccaggctagagcgcaatggtgctcttggctcactgcaacctccacctcctgggttcaagtgattctcttgtctcagcctcccaagtagctgggactacaggtatgtgccaccacgcccggctatttctgcatttttagtagagatggggtttcaccatgttggccagactggtctcaaactcctgatctcaggtgatatgcctgtcttggccttccaaagtactgggattacaggcctgagccactgcacctgacctgaagtttatgttctattaaatagcaacagacagtaacataaaccaaaaataaataggaaaacaccataacaaaaatcaaacagtgatataattgagagttgcttctatttctttttgttgtcttcttggttcaatcagcctgctaaactatatggaacctcattttcatgggccacttatttaagccgggggaccttggaaagtctctcatgtctctcatctcaacggcctaatgtgacttctcttgaaatatttggacattagcaggaagctgaggctttacatcagatctttactttaatggtggacttgactttactggtagatttttaggctctgtgtggactgtggagatgatatctggggggcaggcagacacttgccctgcctctgtctgagaaaattctgttttggatgtcttgttgaagttggtgctggcatcctaagcccttgctggggtcgtaatttaattcatcagaatgtgtggcttgcaagaaccggctcagatcctgcccttcaaaaacaaaacatgagcgtgccaagaaagtccaaggtgttgaatgttgccacttcaagcctaaactttctaggaacacctaagtgggtggcagcttccagttctccaggctgcttctaggccagagctgggttccacaagagacagaataggcatatatatgcttaaggaactggaaaaacaggctctctctctctcacaaacacacacacacacataccaaggtagctgtcaaaatgttatccgaaattttggaaccaaaaaatcttgaaagatggtattccaatatcacattttatgtaagttttctattatattagattcaaattacgattcgaggccacaagctttaagaattcagggcctttttaacttgccaagccccacaccactccaggaacttccccacaccccagttctcagaattcatgtgcaaggtctttcctaaatccagggtccaggtcagagagtggaggatgtgctctatttcttacctgattgcagacccctctgacagtgctcccttctgaagcactcactgtctgaacgtacacagtctcagacttaatcatgcacagtgagcaagactgtggtgtgataattggcgtccctgacttattagggcaaatctatgggagggggagacctcctggaccactgagcaattaattcatttacattaggaagtttctccgtcagatgcaggaaaaaaatcttgttttcctgctgtggttttgacttttgccccatcttctgttgctgttgtaggaggcaaaataagggtcaaggcctggaaacacaagtgctttgactgaagctccacttggcttccgaagcccaagctgggttgtaccaggttccctagggtgcaggctgtgggcaactgccagggacatgtgcctgcccaccggcctctggccctcactgagttggccaatgggaaatgacaattgtgaggtggggactgcctgcccccgtgagtaccaggctgttgaggctgggccatctcctcctcacttccattctgactgcagtctgtggttctgattccataccagagggtaagagcaattctgtgaagttccaggctgggtgggggatgcatgcatagcctctggctgggatcacccaggctctcccgtccgtagtagtgtgggagtggatacaggtggatactctggtcagagcagcactggtggaggcagatatgcactgggcttcttcctccgttctcccacagccccaagagagaaagggttatttcagacattccttctaagatgcatggaaccattctgaattttgcccagttcgctctgtagcaggatacctattgagaaaaagttagggtcagtaaggtggaagggtctgtccacagatgaagtccaattcgattaagggggataagggaatacattgcctcttagcttgaccaggtagggcaaaggaagaagcatatatgaaggcagcttcagaaaagtcaagctgagcactgacttcagactggaattaggaatccagctctgccactttattctactcagcaaatatttactgagcaaattctatgggctagacagtggattgggttcacaagatacaatgagtgtgacatggttgttgtctatggatttggggatatatgtaggtatagggatatcttacaaggtaatcaagaggttctaatgaggccagccatggtggctcacacctgtaatcccagcaatttgggagaccgaggcgggtggatcacctgaggtcaggagttccagactagcctgaccaacatggtgaaaccccgcctctaccaaaaatacaaaaattagttgggcgtgatggcaggtgcctgtaatcccagcttctcgggaggctgaggcaggagaattgtctgaacctgggaggcagaggttgcagtgagccgagattgttgccactgcattccagcctgggtgacagagcgagactttgtgtcaaaaaaaaaaaaaaaagaaagaaaagaaaaagaggctctaatgagataaaatgagaaaagcctggcatatagtggcaacttatgaaaaattgtaattaaaaaaaaacattttctgacagaagaaactggatctacctggtttttctgaagcctaatcctgctcgccccagtgagtgctgtttctgaggcatcctggttgttttgagctgtggatgctgaaggttagagtgggagggattttagaggttaggtctgcccctcttgtgttagaggacatggatccctggtctggagaggttctggtttttggatcaagcctcacaaggggtggcaccaactcactcctaggaactccgctagaaggaaggccagctctgcctaattcggttggggagatgggggtccctttatgctagcagaatatgtccgaaggagcatgatggtgtcagctttgttcatgaaggccagtggtacacagggagcccggcagcttcctcagcagtccctgctgccactcttccttaagtcttgaggagtctttttttggcacaatctcagctcactgcaacctccgcctcccaggttcaagcgattctcctgcctcagtctcccaagtagctgagactacaggcatgcgccaccacgcccagctaatttttatatttttagtagagatggggttcaccatattggccaggatggtctcgatctcttgacctcatattccacctgcctcggcctcccaaagtgctggtattacaggtgtgagccactgcgcctggccgaggagtcttaagctgagatcacagcattgcactccagcctgggcaaaaaaagcaaaactccatctcaaaaaaaaaaaaaaaaaaatagacacaagactggctccttgtcttttttggggacagggtctcactctatcacccaggctggagtgcagtggtgcaatcacagctcactgcagcctcgatttcccaggctcaagtgaccctcccatcttagcctcctgagtagctgggactacaggtgtgtgcaaccatgcctggctaatttttaaaaattttttgtagagatgaggtctcactatattggctggggggcctcaaactcctgggctcagcagtcctcccacctcagcctcccaaaaggctgggattatatgcttgctctttttaaggtggctgtagggacaaactttccacctactccttgtcaagccagtggaccggtggtcccagacatacggctaaagtcaagaggtgatgtcttttggagagatactttcaatcaggaatttcaatcagaaattcaatcatgtggagagagacttatcctaaaaatgtggtggtgcgtgggatgctctgttttattagttccttgacagtatgtatgtgtgtgagtgtgtgtgtgcgcgcgcgcacactcatttggatgggtgtgtatgtgtgggggggggtggtgcgtacgtatgtggatgtgtggatgtggtgtgtgggtgtgcgcgtgcataggtggaggtgtgtgtatgggtgcgggtatgtgtgtgtgttgggcatggagatattgacagctctcccagggctgagtgaaggctttcgggcaaagctcctgggagctaggcaaagctgagttgattcctggttatgccatttattattgggttgcaccgtgtgaaactgccaatattctacactttgacttttatttatttttatttttattttttttgagacagagtttcacacttgtcacctaggctggagtgcagtggcgcgatctcagctcactgcaacctctgcctcatggattcaagtgattctcctgcctcagcctcccaagtagctggaattacaggtgcccgctaccacgcctgactaatttttgtatttttggtagagacgggatttcaccatgttgtccaggctggtctgaaactcctgacatcaggtaatccacccacctcagcctcccaaagtgctgggattacaggcatgagccactgcgcccggcccattttgacttttaaaaatgggagtttgatataattcaatccagtggttgaattagctagcatcgttccctctccaagtctcaggttctcctacacgttagagtcaaaagcagggctatgggaagattaagtaaaataaattttgaaaatgccttatgaaaattacactccaaagaactcgcgccagtgtcagtgttctcatgttcctcatctcacatgatcacatttcgcggattaggaagctgagtctgagaagctccgtgtagtgctttttcggaggcaccgtgatgtgatggaaggctcactcgttaggaagtcagaacagagtctctgagggatcatctccttaatctgtcagtttcctcatctctgaagttgggctcatttccttccttcatggagttattgtaaagatgaagataaataacgtgtaaaatctagcatgggaactggcttctataaggttctaataagtgcattcctactccttcccctcagccttcccatttgtaaaagcaaggcaggggtgaggtgatttctggggctccttttggctctgacatttgaggattttgtatacttttttttttttgagacagagtcttgctctgtcacccaggttggagtgcagctcaatgcaaattccgcctcccaggctcaagcaattcttatgtctcagcctcctgagtacctgggattacaggcaggcaccaccacccccagctaatttttttgtattttcagtagagacggggttttgccatattggccaggctggtcttgaactcctgacttcatgtgacccacccatctcagcctcccaaagtgctgagatgacaggtgtgagctaccgtgcctggccaattttgtgtgctttaatgcccttttctgctggaagagttggcaccaggtttggtgatctctttcccccacacggctctgcctcctgccagtcccagaggggaccctgtccttgcatttcacaggattctgctgttgcaactgaaattccagtaggtcaaagtgaaatttctcatacactttaacatgaagataaatgatcacagtatggccctttaggatcctgagaacatcacggtcatcccctggtataattttaaaagcagatgaatccatgcctgtgcgaggtttgccaggaaagccagtgctgggattacagtggaagtctttttatgctacttttttcttgtatccctcaccccatggggtggcatattgaaaggcaggatgtgtgaccacgatacttttctcctcctggactatgtctaagagtctgttattgggttctgaagatcagagtttaatttccgactcctctctgtgtagctctgggatcttggaaagccacttaacctttctgaagtcccctttcctcatctctaaaatgcatacactcatcactaacatttactgagcactgacatgtgccagacaccattctaagcattttacacagactacaccatttgatcttccaacaaacagaacactgaaacgcattacaggtcagaacaaatgatttgtgcctaagcaccaagaccgtagagcccgtgctccctattctaccctatcctgtctctcaaaatgattgtgagaatcgaatgagacactaggtgagaaaagggttttataaatagcattttaaaaattttttaaagtccacaaaatttttaattttaatacagataaaatagatccctttgttttataaaaagtaacaaaatttgttatacaacaactatgttatttattaattttgcctttttgtatgctgccaggaaagaaacattaagaaatcttaaattgattatggtgaatcagaaggtctgcctggactttttattgctctaactgtacagctgatcatactacctcatttttttttatgacacttcaagggtgcgcttagcttcatcactccttcgttgccaaaagctttgtgaccaaaaacaattaagcagattcctgagtcactaaatgacacataaccagagttgagacttaggaacttttagtgccatgctaagcccacagggacacaacaaatagcattttacaaaggcaaagaattgtgacacttgagatttagcttgttgatccttgtaaaagttttctttttaggcataattgagttttagatcatagtactcactattacttagtaataatttttttctgatagaaatacagtgtaacaggccgggcgcagtggctcatgcctgtaatcccagcactttgggaggccgaggcgggcggatcacttgaggtcaggagtttgagaccagcccggccaacatggtgaaatcccatctctactaaaaatacaaaaaattagccaggtgtggtcgtggattcctgtgatcccagctacttgggagggtgaggcaggagcatcagttgaacccaggaggcggaggttgcagtgagccaagatggtgccattgcactccagcctgggccacaaagcgagactccacttcagaaacaaaaaaaaaagagagagagaaaagaaggaaggaaggaaggaaggaaggaaagaaggaaggaaggaaggaaagaaggaaggaaggaaggaaggaaagaaggaaggaaggaaagaaggaaggaaggaaagaaggaaggaaggaaggaagggtaacaagcaaagtgtaacaatggcaatatctaaaaaaataggtatttttatatgtttgtcgttttatatatatgacccccactttagagatgaggaaactgagagattaaggaaacgatccctgagagactctgttctgacttccaaatcggtgagctttccatcgcatcacggtgcctccgaaagcatgacacggagcttctcagactcagcttcctaatccgctaaacgggattatgtgagatgaggaacatgagaacgctgacatgggtgagggttccttggagtatcattttcatgtggcattttcaaaacttattttacctaatcttcccaaagccctgcttttgactctaatgtgtctcctgagacttggagagcgcaagatgctagcgacagagcaagactccatctccagataaataaataagtaaaataaaaaagaacacaaataattttgaaaatttttttgaaaattaggcacgtttgcactgaccttcaattgttattaattgctggtttcccacccagaattaagttggaatgcaactttcttttacaatcagagtccgttcttggtcttggaaacttctgaggctcctgtgctaatcacactcttgtatttttggcacctctaccccgtgccactgtcatggaacccaggctgatcgcacctattagtggagaaatctgtccataatactgaagtttggggacaaacagtgttcccttagggtaggagaaagagatctttatttttgacaaagggggaggagccagaaaactccagagacccctgagtttgccctctctccaaggtttggggtaagccccccgtcaccctttatctctggggctttcacatattctggattctctcctcctgtttcccagcagaaaaggatggagcctcacagattcttcccatttctggagaaaaacatgcatggagctcaaagttcttctcaggagttttattgccaaagccataataagaaagggtggaggtgacaagcagtgaggaagtttaaagatgcatgaaatctgtaaagtctcagaacaagaattctcctaaaatgcaaaaggggctttgctggtctccccttggcttctcatgtagctcacctcttttttcttatcttgagactagtcaaacctaagctgtttctcattttatttccagaagctattgagaacactctcctgaattcttcaaattcagtagagggcgacaaatgtacatataaatgatggtagtgggtcttaaataaagactcatgacacctaaaggggcagcacctgagtctgattgcacctgtttctgttgctgtttctgtctctcttctctctgtctgccatttcattatcaatggttactttacttataagatcatattagaacctgatatttgataaatgatgcatcagatctatagtgagagaaaaaattaatgcaattaaaggtgttgtaacagctagtcttcaagtggggagaaatcatttgagtaccttaggtcacagcttacatcaaaacaaaaaatcagagctacattaaaaagtgaaattttaactatatcaaacaatagaaaaaaacagaagaaaattgaatacttactaaatcttagcatgaataagaactgtttaacacttagaggcaaggactgggcgtggtggctcatgcttttaatcccaggactttgggagcccaaggcgggcggatcacctgaggtcaggagtttgagactagcctggccaacatggtgaaaccccgtctctactaaaaaatgcaaaaattagctgcgtgtggtggtgcatgcctgtaatctcagctacttgggaggctaaggcatgagaatcgcttgaacctgggaggtggaggctgtagtgagccgagattgtgccactgcactacagcctgggtgacagtgtgaaatcctctctctcaaaaaaaaaaaaaaaaaaaagcaaactagagcagtgaggtaccattatttcctttgctcactaaactgacaacacacaaatgttttttataatacccaaagctgatgagggtagttaaggtatgcccttttatacacacactaatgatgtactactggttggcagtataacatatgctgccatgtggggatatgtatcaggagacttaaaaatgtgcataccttttggtccagtaatttacttctgggaatctgtcataacagaataataatcttggggaaagctacatgcctaaggatatttaaaatattatttaaaaatcaaagtataatttcttacagaatataaaataatattttaaaatgaaaatatgctaaaagtttgatgaaatataaatggtcaaatatatattgattatatccacttactagactagcactcactctgagacgttaaaaatagtcattataaaaactagaaaatgccaaagacaaaataaaggaataaagttttacataaagtatgattccactatgtttaaaaataaacagagacattcttggagttgagtattgttttcttttctgtcatgtccaaagaactatataactattatttttaatgaactatatatgtaatatatacatatagtttatatgtatatacaaaatttatctcatatatatgataaagatgaaagatgagttggatgtgccacgtgaagagggtagtatagaaccccaggtaatggggcataggagtgggattccagataccaggcccatgtttttggggtgagattgccaatcacggtctttcttccatccctcacagaggagtaggtttgtcttcaacaaaccttcagttgtcctgaagacaaacctaattctggagacttcatataatctagaagagacaagcaaactgatgaaaaatagtgaatttttaaggtaaaataaagtacatggactacactttgtttagaatcagattcttgggattaaccacattaacccacagagggtcttagtgatgcctctaatccaggatcctaggacctatttctctctgtgagatgctttctcccaactccttggtgagagtgggaagactaagacctcagcaatctgaggtggaggcctaagatccccctaagatcggaggcagaatctgagaggggataaaagtccctatacctgtattgggcccttttctgggagggggatatcaaagaatgattttgagacagggaggcttttgactacctgtgccacttgagctctttgctagggctccagaatacatatttcaaatacattccccctccctccttccttccctcttccactcttcctttttatcttcctttcttcttttccttcctccttcccttcctttctctggctctctcatgatttcttttcctcattataaaagtgcttatttagtccctactctgctattagtgtgttagtctttgtcccctggtacttgctgtttaatggagaaatgggtgagcaaaacagaaattacagcagagtgcaatgatagagctaagccaggtgtataaatccattctcacactgctgtaaaaaactacttgagactgggtaatttataaagaaaagaggtttaattgactcacagttccacaggctgtacaggaagcatggctggggaggcctcagaaaacttacaatcatggtggaagaaagagcgaaggggaagcaagcacatcacacagcagcaggagagagagagagaaagagagagagagagaatataggggaagtgctacacactttcaaccagatcttgtgagaattcacctactatcatgagaacagcaagggataagtctgcctccatgattcagtcacctcctaccaggccccttctccaacacatgtcgacgtgctatttgggtggggacacagacccaaaccatattaccagggcactggagaaacacagaggggaaagaaccagccaaggagtgagatggagaacaaggaggacttcttgaaacagatgacatccaaactgggtcctgaaagctgaatagagattagacaggggaggaggggcagctaaagatggctcaggcaaacaaagggccaggggatatgttcatgggatgatgtgtctctcgttgtctgcttaacacaaggtgagtctctccctccctctctctctctttttctctgtgtgtgtttgtgtgtgtgcatgtgtgcaaatgtaatatacccaatagtcaaacatgtgccccaggagaggggtagaggaagaaagagaatgagagagtaagaaggaggaatagacacagaaaatgagagagaaggggggaaagaaaaagaagaaaggagccagaggagagaagctggttagcattgaatggagcaatctgtgtcatcgtacttgggaaacccaaggatggattcttggcaagtcgactcttggagctttccctgtgcttggtcctgtgctcagacatgggaaaattagaggagtgtcatctgtgcaatcactgaattcataatcttggtgaggaaaggagactacacacagggaataatgctaagtattacagatttcagggcagaaagagatcaaggtgggctgcaatattcagaaaagtcttcctggaaaagttgaatacttagaaagcagctcctagaagtagactctgctgagatggacggagtcctttgtaggtcccaactgggtgtgtgtgtggggtctgtctctccatggctgacagtgcacatgtggattccagggctcaggatgctgttgctgggagctgttctactgctattagctctgcccggtcatgaccaggaaaccacgactcaagggcccggagtcctgcttcccctgcccaagggggcctgcacaggttggatggcgggcatcccagggcatccgggccataatggggccccaggccgtgatggcagagatggcacccctggtgagaagggtgagaaaggagatccaggtaagaatgtttctggcctctttcatcacagacctcctacactgatataaactatatgaaggcattcattattaactaaggcctagacacagggagaaagcaaagcttttttatgttaaccataagcaacctgaagtgatttggggttggtcttccaaggatgagtgtagatggtgcctctataaccaagactttggctttgctgcatctgcagctccttttccatcccctttcccatcttcaccctcatccctattcccagtacattcatattctgattcctctttctgtctgcttaacttccatttcacccagtggcattcaaccacatttactgcacaccccctgaaaggctcagtcctgcctttggggaactcttgatctaggtaagatgtctaatgtgcaaggctctgttggtggttactacaagaaagtctactctaaaaatgtcaaactgaatgtgaacaagtattcaaagtatggagcatagagaaaatatactcaccgtggacctgatgaagaatgaaggcttcaaggaggaggcagagcttcagctaggccttgaatgatgggtaggcagaatagaggaggagagacatcctagatggagggggtagaattgcaaaaccagggttgatggtgccagcacataaagggctggcagggtggagggtctatgatagagacctataggagataaagatagagttgaaattatgggagcctccatgtctgtgggagatatagaaggaggaggtaacacctctctccttttgggagctcttattggtttcttgatctataagtcaagaaggttgtgagtgggagccacagggatggtaatttaggctgtaaccaacctaggcaggagttctgttctttgtagtcactgaggtcttctcattccttaggtcttattggtcctaagggagacatcggtgaaaccggagtacccggggctgaaggtccccgaggctttccgggaatccaaggcaggaaaggagaacctggagaaggtgcctatgtataccgctcagcattcagtgtgggattggagacttacgttactatccccaacatgcccattcgctttaccaagatcttctacaatcagcaaaaccactatgatggctccactggtaaattccactgcaacattcctgggctgtactactttgcctaccacatcacagtctatatgaaggatgtgaaggtcagcctcttcaagaaggacaaggctatgctcttcacctatgatcagtaccaggaaaataatgtggaccaggcctccggctctgtgctcctgcatctggaggtgggcgaccaagtctggctccaggtgtatggggaaggagagcgtaatggactctatgctgataatgacaatgactccaccttcacaggctttcttctctaccatgacaccaactgatcaccactaactcagagcctcctccaggccaaacagccccaaagtcaattaaaggctttcagtacggttaggaagttgattattatttagttggaggcctttagatattattcattcatttactcattcatttattcattcattcatcgagtaactttaaaaaaatcatatgctatgttcccagtcctggggagcttcacaaacatgaccagataactgactagaaagaagtagttgacagtgctattttgtgcccactgtctctcctgatgctcatatcaatcctataaggcacagggaacaagcattctcctgtttttacagattgtatcctgaggctgagagagttaagtgaatgtctaaggtcacacagtattaagtgacagtgctagaaatcaaacccagagctgtggactttgttcactagactgtgcccttttatagaggtacatgttctctttggagtgttggtaggtgtctgtttcccacctcacctgagagccattgaatttgccttcctcatgaattaaaacctcccccaagcagagcttcctcagagaaagtggttctatgatgacgtcctgtcttggaaggactactactcaatggcccctgcactactctacttcctcttacctatgtcccttctcatgcctttccctccaacggggaaagccaactccatctctaagtgccgaactcatccctgttcctcaaggccacctggccaggagcttctctgatgtgatatccactttttttttttttgagatggagtctcactctgtcacccaggctggagtacagtgacacgacctcggctcactgcagcctccttctcctgggtccaagcaattattgtgcctcagcctcccgagtagctgagacttcaggtgcattccaccacacatggctaatttttgtatttttagtagaaatggggtttcgtcatgttggccaggctggtctcgaactcctggcctaggtgatccacccgcctcgacctcccaaagtgctgggattacaggcatgagccaccatgcccagtcgatatctcactttttattttgccatggatgagagtcctgggtgtgaggaacacctcccaccaggctagaggcaactgcccaggaaggactgtgcttccgtcacctctaaatcccttgcagatccttgataaatgcctcatgaagaccaatctcttgaatcccatatctacccagaattaactccattccagtctctgcatgtaatcagttttatccacagaaacattttcattttaggaaatccctggttttaagtatcaatccttgttcagctggacaatatgaatcttttccactgaagttagggatgactgtgattttcagaacacgtccagaatttttcatcaagaaggtagcttgagcctgaaatgcaaaacccatggaggaattctgaagccattgtctccttgagtaccaacagggtcagggaagactgggcctcctgaatttattattgttctttaagaattacaggttgaggtagttgatggtggtaaacattctctcaggagacaataactccagtgatgttcttcaaagattttagcaaaaacagagtaaatagcattctctatcaatatataaatttaaaaaactatctttttgcttacagttttaaattctgaacaattctctcttatatgtgtattgctaatcattaaggtattattttttccacatataaagctttgtctttttgttgttgttgttgtttttaagatggagtttccctctgttgccaggctagagtgcagtggcatgatctcggcttactgcaacctttgcctcccaggttcaagcgattcttctgcctcagcctcccgagtagctgggaccacaggtgcctaccaccatgccaggctaatttttgtatttttagtaaagacagggtttcaccatattggccaggctggtctcgaactcctgaccttgtgatctgcccgcctccatttttgttgttattttttgagaaagatagatatgaggtttagagagggatgaagaggtgagagtaagccttgtgttagtcagaactctgtgttgtgaatgtcattcacaacagaaaacccaaaatattatgcaaactactgtaagcaagaaaaataaaggaaaaatggaaacatttattcctttgcataatagaaattaccagagttgttctgtctttagataaggtttgaaccaaagctcaaaacaatcaagacccttttctgtatgtccttctgttctgccttccgcagtgtaggctttaccctcaggtgctacacagtatagttctagggtttccctcccgatatcaaaaagactgtggcctgcccagctctcgtatccccaagccacaccatctggctaaatggacatcatgttttctggtgatgcccaaagaggagagaggaagctctctttcccagatgccccagcaagtgtaaccttgcatctcattgctctggctgagttgtgtgcctgtttctgaccaatcactgagtcaggaggatgaaatattcatattgacttaattgcagcttaagttaggggtatgtagaggtattttccctaaagcaaaattgggacactgttatcagaaataggagagtggatgatagatgcaaaataatacctgtccacaacaaactcttaatgctgtgtttgagctttcatgagtttcccagagagacatagctggaaaattcctattgattttctctaaaatttcaacaagtagctaaagtctggctatgctcacagtctcacatctggttggggtgggctccttacagaacacgctttcacagttaccctaaactctctggggcagggttattcctttgtggaaccagaggcacagagagagtcaactgaggccaaaagaggcctgagagaaactgaggtcaagatttcaggattaatggtcctgtgatgctttgaagtacaattgtggatttgtccaattctctttagttctgtcagcttttgcttcatatattttagcgctctattattagatatatacatgtttagtattatgtcttattggtgcatttactctcttatcattatgtaatgtccttctttatctgtgataattttctgtgttctgaagtctactttgtctaaaaataacatacgcactcaacttccttttctttcttccttcctttctttcttccttcctttctttctctctctctctctttccttccttccttcctccttttctttctctctctctctctctctctttttttgacagactctcgttctgtggccctggctggagttcagtggtgtgatcttggctcactgctacctctaccatgagcaattctcctgcctcagcctcccaagtagctggaactacaggctcatgccactgcgcccagctaatttttgtatttttcgtagagacggggtttcaccacattcgtcaggttggtttcaaactcctgactttgtgatccacccgcctcggcctcccaaagtgctgggattacaggcatgagccatcacacctggtcaactttcttttgattagtgtttttgtggtatatctttttccatcatgttactttaaatatatctatattattgtatttaaaatgtgtttcttacagactgcatgtagttgggtataatttttatccagtctaaaaatatctgtcttttaattggtgtttagacaatttatatttaataaaattgttgaatttaagatggatgactgttttatttgtttgctgttcaccacttctgttttattctctttccagaattcttttggattgtttaaatatttcataatattttatcttaatttatttattgggtatttgcctatatctctttgtggtattttttagtggttgcttgagggattacaatgtacttaacttttcacagtgtgcataaagttaatattttgccacttgcagtaaaccgtagaaggcttataatcatattagtacctctatccactttcttttatgttgtagttgtcatatatattacatctatatacactgaaacattataggcaatgttatgatttttgcattcgtcagtcatatatatattttaaagaatttaagaggagaaaaatacatattcagatattcatcatttcctttgttctttattaatttctaatgttctgtgtttctctctggtgtaatttctcctcaacctgaaaaactttattgagcatttattttaaagcaagtctgttgatgatgaattctcttagtttttcttcatctgagaatgccttcatcttttctacattcctgaaatatatttttactggatatagaattctcagttgacagttctttcttctagcattttattttatttagtttatttttttcagtgcattaaagatgtttctgtcttctgggacccatggtgtgtgtgtatatatatatatatttttttttctctttatctcaaaggctctatggtttcagatgagaaacctgcagtcatagttttcccttatgtgtaatttataattttttcttccagctgctttcaagatgctttctttacctctgattttcaatagtttgattatgatgtgtctgggtgttttcaactttcacccattttagggttcattaaacttcttgaatctataaatataggtctttcagcaaatttaggacattttctgcagacattttttatttttatttttgagatttgagtgttgctatgttgcccaggctggtctcaaacttctgggctcaagtaatcctcctgccttggcttcccaaagtgctgagattataggtctgagccactggattttctcaccctcagaactgtgagccaacaaatttctgttctttataaattgcccagtctgtggtattctgctatagcagcacaaaatgggctaagatactgggccgaccagattcctccaggaatacgaattaggatggatgtaaaacatgcagattcaggactcatgggtccttctgccctgcagtgtagaacaagaagaggcccagctgtgagaaaggtagaggctttgagagaaacagaattgaaagtcagagagagagagagagagagagagatcttggatgctttctactttttggttcagtccttcctgagatttaactatatcccaacccacgggggccgtaagacaccagttcctgtatttttatgccatctctccttttaatgtgagttagcttgtatttattttatgtacatctagaaagtacacagggggctgagcgcagtggctcatgcctgtaatcccagcactttgggagaccaaggtgggcagatcacttgaggtcaggagttcgagacctgcctgaccaacatggtgaaactaaaaatacaaaaatcagctggttgtggtggcgtgcacctgtaatcccagctacttgagaggctgaggcaggagaatcacttgacctgggagacagaagttgcagtgagccaagatagtgccactgcacttcggcctgggcaacagagaaagactctgcctcaaaaaaacaagtaaataaaaataaaaagtacacagggttggaaattaaactgtgactgtgcccaggcaccaagctcaggctcagttaggaagaaaacttggcaacaggataatagagtcaagtcattaggcacccataagattacacctaaaaccctagcttcacttacatgtattttattagcaattaacctcctagcttagaaatcccttgtggacagagactttgtatttcatctttgaattctttacaaagatcattgatttattcagtaaatatttattgtctattttatactgggtacatcataatcttaaaaatagaaataataatataattatcattttgaagtagctgcttgaaatacattattttatttactctttacaacatcttgtacattaaatatcattgaccccattgttagataagaaaactgaagcttagagaagataattaactggctcaaagctgcagctagtaaattgtagagcaaagattcatagccagagctgcctgataccaaaagctatgctgttatgaaaaataaaccccaatttcattggactttttttctttatagtttcaagacattgggggatagagttatacaacctgtagccttaatgttagcaatcctgtaaataccggtaatggaagaacttgcctttgtaaaatgagtcattcaatttgttatgtggcagaaagtccggttgtttaaagaaaatatgatgaaatgtctcactcatctttcacgtgggcaagttctgaggactgcactgaggttctttgtagtgtggtgctagaaaataagggccttccaaaatagtttgttcatgccagctgaaatagcttaagtcaatgctcaacctttctttatctaaaaaattctataacttaaggccaggcacggtggctcatgcctgtaatcccagcactttgggaggccgaggccaatggattacctgagatcaggagtttgagaccagcctgggcaacatggtgaaatcccgtctctactaaaaacacaaaaactagccgggcatggtggctggcgcctgtaatcccagctactcaggaggctgaggcaggagaatcactggaacctgggaggcggaggttgccgtgagacaagatagtgccattgtactccagcctgggcaacagagtgagactccatctcaaaacaaaacaaaacaaaacaaacaaaaaaaactataacttaaagatagaatgttatttccctggtatgataaagaataacaaattgtaaataatatccaacattataattaatagcaaaacactaaataaatccccattaaaattggtacaaaacaagggtgcttgctttcaccattctaactttaacaatgttctgggaaattccgttgatttgtcctcttatctttgaacttcctcttgttttattttattcatgttcttatcacagtcttccaaaaacaggaattcatggagagttttgtgggtttttctaaattttggtatatatatacatatatatagcaaatatagataatgtatgtatagcaaatatatttatatatatatatatatattacatatatatatatttcccagactgggttcttggcatgttgttcatttcttttttttgttgcttttctgtagtatacctggctgatccagcttgcttgtgttgaacgtgggtctttctagactttgtttgctctgatacagtgagcatgactgccatctctgatacttgcatgtctcacctcccagccacagagcaagagctgaaatctcattttctttccacttttctgagacggagggaagagagaatagaagcagactctggggattgtgcagcctttgttgggtaacctggcttttactctctcttctaaaatgctgttaaatgtttggtaccacaaattaacccatctcgttggccatgcatcctattcccatggtggaatacctctaggtccacaggttcctagtaacccctaggaaccatcagctcttccacagagatcttgagatatgctagtttgtactctgacaggagtctgtactctgacaggttttttctagacttttccttgggatacttacttacctgttgagtcttctttgccccaggttgaggagaactcacaggaatttgtccaatcctcttctttttagtatagtcttggtgggtgggaggctacagtgatattagaagccttgccatgctctggcagaatcttttgtttccttcctcaatagccatgttttgaagtctgtgacttgtcattacacccttttcttaattttgcttctggtgaattttcaggggtgttaatgtttttcttttttgatggtcatttgaaagagcacacaggtgagactgtataagatttttaaaaacagtaatttaggtgggataggcagctaaccttgctaggtactgaaaacatattacaaaatcatagcagttaaaacagagtatcctggctcaggcgcggtggctcaagcctgtaatttcagcacttagggaggccgaggtgggtggatcacttgaagtcaggagttcgagaccagcctggccaacatggtgaaaccctgtctctactaaaaacacaaaaattagccgggcttggtggacatgcctgtagtcccagctactcaggaggccgaggcaggacaattgcttgaacctgggaagtggaggctgcagtgagctgagaatgtgctgccgcactccagcctgagcaacagagtgagactctatttcaaacccccaccgcgcccccccaaaacagagtatccctagcataagaatagacagacaggttaatgaaagataagagtgaccagaattagaccctaagatatgtggaactttaatatgtgataaaagatttatgcactttagttatttagaaaaaaaggaacactcttggcctcttcctcatatatacttgaaaaatattgcaaatagtccctctccctctccctctccctctccctctccctctccctctccctctccctctccctctccctctccctctccctctccctctccctctccctctccctctccctctccctctccctctccctctccctctccctctccctctccctctccctctccctctccctctccctctccctctccctctccctctccctctccctctccctctccctctccctctccctctccctctccctctccctctccctctccctctccctctccctctccctctccctctccctctccctctccctctccctctccctctccctctccctctccgtctccctctgatgccgagccaaagctggacggtactgctgccatctcggctcactgcaacctccctgcctgattctcctgcctcagcctgccgagtgcctgcgattgcaggcgcgcgctgccacgcctgactggttttcggtttttttttggtggagacggggtttcgctgtgttggccgggctgctctccagctcctaaccgcgagtgatccgccagcctcggcctcccgaggtgccgggattgcagatgaagtctcgttcactcagtgctcagtggtgtccaggctggagtgcagcggcgtgatctcggctcgctacaaccacctcccagccgcctgccttggcctcccaaagagccgagagtgcagcctctgcccggccgccaccccgtctgggaagtgaggagcgtctctgcttggccacccatcgtctgggatatgaggagcccctctgcctggctgcccagtctggaaagtgaggagcgtctctgcccggccgccatcccatctaggaagcgaggagcgcctcttcccggctgccatcccatctaggaagtgaggagcgtctctgcccggccgcccatcgtctgagatgtggggagcacctctgccccaccgccctgtctgggatgtgaggagcgcctctgctgggccgcaaccctgtctgggaggtgaggagcgtctctgccccgccgctccgtctgagaagtgaggaaaccctctgcctggcaaccgccccgtctgagaagtgaggagcccctccgtccggcaaccaccccgtctgggaagtgaggagcgtctccgcccggcagccaccccgtccgggaggtgaggggctcctctgcccggccgcccctactgggaagtgaggagcccctctgcccggccagccgccccgtccgggagggaggtgggggggtcagccccccgcccggccagccgccccgtccgggaggggggagggggggtcagccccccgcctggccagccgccccgtccgggaggtgaggggcgcctctgcccggccacccctactgggaagtgaggagcccctctgcccggccagccgccccgtccgggagagaggcggggggggggggtcggccagccgccccgtccgggagggaggtgggggggtcagccccccttccggccggccgccctgtccgggaggtgaggggcgcctctgcctggccgcccctactgggaagtgaggacccctctgcccggccagccgccccgtccgggagggaggtgggggggacagccccccgcccggccagccgccctatccaggaggtgaggggcgcctctgcccggccgcccctactgggaagtgaggagcccctctgcctggccagccgccccgtccgggagggtagtgggggggtcagccccccgcccggccagccgccccatccgggaggtgaggggcgcttctgcccggccgcccctactgggaagtgaggagcccctctgcccggccacgaccccgtctgggaggtgtgcccagcggctcattggggatgggccatgatgacaatggcggttttgtggaatagaaaggcgggaagggtggggaaaaaattgagaaatcggatggttgccgggtctgtgtggatggaagtggacatgggagacttttcattttgttctgtactaagagaaattcttctgccttgggatcctgttgatctgtgaccttatccccaaccctgtgctctctgaagcatgtgctgtgtccactcagggttaagtggattgggggcggtgcaggatgtgctttgttaaacagatgctttgttaaacagatgcagcgtgctggttgagagtcatcaccactccctaatcttaagtacccagggacacagacactgcggagggccgcggggtcctctgcctaggaaaaccagagacctttgttcacttgtttatctgctgaccttccctccactattgtcctatgaccctgccaaatccccctctgcgagaaacacccaagaatgatcaataaaaaaaaaaaaaaaaaaaaaaaaaaaaaaaggggcccaggggacaggcattcagcatatggaggatccacgccagccccggctgctgcgttcccttagtatttattgctcattatcgggcgtgacaggataataggataatggtggggaggtcggaaggtaaacacgtgaacaaatgtctctgcaccataaacaaggtaaagaaaaaagtgctgtgcttttgatgtgcatatacataaacatctcattgccttaaggaacagtattgctgccagcatgtcccacctccagccctaaggcggttttctcctatctcagtagatggaatatacaatcagctttacacccagacattccattgcccagggatgagcaggagacagaagccttcctcttatctcaactgcaaaaaggcgttccttcctcttttactaatcctcctcagcacagaccttttacgggtgtcgggtgtcgggctgggggacggtcaggtctttcccttcccacaaggccatatttcagactctcacatggggagaaaccttggacggtgcctggctttcctgggcagaggtccctgcggccttctgcagtgttttgtgtctctgggtacttgagattggggagtggtttgagattggggagtggtgatgactcttaacaagcatgctgccttcaagcatttgtttaacaaagcacaccctgcacagcccttgatccatttggccctgagttgacacagcgcatgtttcggggagcacagggttgggggaagggttacagattggcagcatctcggggcagaagaatttttcttagtggggagcagagtggagtctcctatgtctacttctttctacacagacacagtaacagtctgatctctctttcttttccccacaatgtggttttgggcgcctgtagtcccggctacttgggagactgaggcaggagaattgcttgaacctgggaggcagaggttgctgtgagccgagattgtgccactgcactacagcctgggcgaaaaaagcaaaactccgtctcaaaaaaaaaaacaaaacacttgtgatttgggggttttgtggaaatttaattacgatgaaaaatctgtatcttttttgtaatgttggcatacttgggtaattttgtggcaaatatatttcccagtggaccttttgttggtggcactaactgcaaggttgctgggaaagtggagtctgtttggtggatgagctctgactgccgttttggaacctcacctctactcatgctgtctcaagtccttgtctcattctccagctctcagttcaaataaagttatttctcctgggaaaaaaagttccgtgaaacgcacactggatgacagtgctgaagttgggtgccctgggaagtcctcaggacacccctgcatgaaggctgccccaggagagcagcgcaaggttgtggaggtctcaaagctctgaagaacctgcctaccgaagacaggagtgcccacaaaacagttggcccatgggctccccaagacctacgtgtacctcggaggcatttggcagaagattctttgtgaacaaaaatctctgcccactaggaggcaggagtgtgtgtgtgtgtgtgtgtgtgtgtgtgtgtgtgttgaaaccagaactccaccttatgtgttcattgtggaatttgaaaatggaagcctaaagttgaaaattaaaatcacccgtgatagctgtaaaaaaaaaaaaaaaaaaaaatcgtaaatgagttcttactttggaagcatatatactaaagttggaatgaaacagagaagattagttactgatttcatttttcaataagtttagatttattatgttggtttcccaatttaaaaaattgacttcttaaaaaatcaaaaaaaaaaaaaaaaaaaaaaaaaaagaaaaatattgcaaatagatcaagtagttaaattaagggtgaaaaatgaacccataaaaaaccactctaaaagtatataaaaatggctactgagtctctagatcagaggggagaccttctaagtttaaaataagagaagaagcaaaagaagaaacataaatagatgtgacgacataaaactttaaatttcaaggctttataaaaaatggccaaaattacaaggcaatcagcaaacctgaatgcgggaggtactaaaaattccttgaccaggggagtcctttgacacagggttttgtttgtttgtttgtttttgtgacggtgttaaggataagaaaggaacaagacaagcaagcaaggtgaggcttgccctaggtcaacctctagtgttcatggagaggaagctgtaaattgtgaggactaggttcaggagtggttgctagggaggaggtagcctgtggctgagctgggaaaagttgcagcagaaccactgcccttacaagaggtaagtgcaagtcacttggggtgacctaagacagaacttcttttttttttttttttttttttgaggtggagtcttgctctgttgcccaggctcgagtgcagtggcacaatttcggcctcctgggttcacgccattctcctgcctcagcctcccgagtagctgggactacaggcgcccgccaccacgcccggctaactttttgtgtttttagtagagacagggtttcaccgtgttagccaggatggtctcgatcacctgacctcgtgatccacccgcctcagcctcccaaagtgctgtgattacaggtgtgagccaccacgcctggcctaagacagaacttttgcttttccattattctttttttttttttttttgagatggagtttcactcctgtcgcccaggctggagtgcaatggtgtgatctcggttcactgcaacctctgcctcccaggatcaagtgagtctcctgcctcagcctcctgagtagctgggattacaggtgcccaccaccacacctggccaattttatatttttagtagagacagggtttctccaggttagccaggctggtcttgaactcctgacctcaggtgatccgcccacctcggcctaccaaaatgctgggattacaggtgtgagccaccgcgggggcctgtcctttttttttttttttttgagatgcagtctggctctgttgcccaggctacagtgcagtggcatgatctcggctcactgcaacatccacctcctgggttcaagcgattttcctgcctcagcctcccaagttgctgggactacaggcatgtgccaccacgctcggctaatttttgtatttttagtagagacagggtttcaccgtgctggccaggctggtctcgaactcctgacctcagttgatccccctactttggcctcccaaagtgttgggattacaggcatgagccaccacgcccggtcccattattcttcttagacaaaacagatcctttcaaaggaatggtaaacttggattacacaatatatttgttaaaaaattggaatctcatgcctgtaatcccagcgatttgggaggtgggagggtctcttgagttcaggagtttgacaccagtctgggcgaaacagggagacctcgtctctacaaatttttttttttttaaattggaatcatcctgaacatctattgtttggcccgccttttcaaatgatttgaatgcttttctacaccacaaaatataattttcaaatgtgttgtctttcaaatgtgatttgtatgtggatgcataatgtttccttatatggatgtcactgtcatttatttgagcaatgtttatgcctagaaatgagacttgttggcaatgtgtatatagttggagcaaaatgtctgagtactttgaaaaatggtgtcagagcccaaatgacttggacatctccactctgagccaactggctcagtgttagtcacaactggaaaagggagatggagagaatgcctcacagactcatgaatgtgtttgtatgatgttattaacagagtaaattataaaatccagacctacaaaaggtcaactatttcgtataatttgagcttgtagaaaacttcctgaatattccactgctgcacacacacatctgttaactggctgaggtttggcaaaggcaaatcagtgttaagagttgaagtagcagctctttctcagattcacacattccttttcacttattggaaacaagatattatctgactcctagtgttgcttacttggcaggcacctttcagtaaatatgaatacattaaatctcagccttaaagacaaagaccttactgtcttcctaattcatgacaaaaatcacagccataaaatagaaagaatgaattctggtattcagctgaagaaaaagtttgactgagttgctttcccaccctggaaaactttctctcagaataatttcatgatggatgattctgtgaggaatgaaacaatgctgtatcattgctataaatgctgtaatgtctgcatgccaaactgctttcaattagtgttttctctggaaactggaaagtatgacacagtcgaggcattagcatgcccattttcttcagtaataaaaagaaaggatactgagcggaactcaggtgtgatagagatttgaggtatttccaagtgacgcttgcctgacactctgttaaataaaattaaaaagaaaaaaataaaagcaaaaaagatctctctaagtggtatggcatgatttctcagctacagcaaaagaagctaccattataccctgccttttcctccatcttgtctagagaacctagacgtataaactcataatttccttttaacttaataaaaatttataaaataggatacaggagttaagaggggggatggtttagggtgatggaaatgtcaggaggtctttgtgttggggatgacatttgaactaggtcttgctaaactga

SEQ ID NO: 1022 - DNA, 39790 bp, Homo sapiens
tcagtttagcaagacctagttcaaatgtcatccccaacacaaagacctcctgacatttccatcaccctaaaccatcccccctcttaactcctgtatcctattttataaatttttattaagttaaaaggaaattatgagtttatacgtctaggttctctagacaagatggaggaaaaggcagggtataatggtagcttcttttgctgtagctgagaaatcatgccataccacttagagagatcttttttgcttttatttttttctttttaattttatttaacagagtgtcaggcaagcgtcacttggaaatacctcaaatctctatcacacctgagttccgctcagtatcctttctttttattactgaagaaaatgggcatgctaatgcctcgactgtgtcatactttccagtttccagagaaaacactaattgaaagcagtttggcatgcagacattacagcatttatagcaatgatacagcattgtttcattcctcacagaatcatccatcatgaaattattctgagagaaagttttccagggtgggaaagcaactcagtcaaactttttcttcagctgaataccagaattcattctttctattttatggctgtgatttttgtcatgaattaggaagacagtaaggtctttgtctttaaggctgagatttaatgtattcatatttactgaaaggtgcctgccaagtaagcaacactaggagtcagataatatcttgtttccaataagtgaaaaggaatgtgtgaatctgagaaagagctgctacttcaactcttaacactgatttgcctttgccaaacctcagccagttaacagatgtgtgtgtgcagcagtggaatattcaggaagttttctacaagctcaaattatacgaaatagttgaccttttgtaggtctggattttataatttactctgttaataacatcatacaaacacattcatgagtctgtgaggcattctctccatctcccttttccagttgtgactaacactgagccagttggctcagagtggagatgtccaagtcatttgggctctgacaccatttttcaaagtactcagacattttgctccaactatatacacattgccaacaagtctcatttctaggcataaacattgctcaaataaatgacagtgacatccatataaggaaacattatgcatccacatacaaatcacatttgaaagacaacacatttgaaaattatattttgtggtgtagaaaagcattcaaatcatttgaaaaggcgggccaaacaatagatgttcaggatgattccaatttaaaaaaaaaaaaatttgtagagacgaggtctccctgtttcgcccagactggtgtcaaactcctgaactcaagagaccctcccacctcccaaatcgctgggattacaggcatgagattccaattttttaacaaatatattgtgtaatccaagtttaccattcctttgaaaggatctgttttgtctaagaagaataatgggaccgggcgtggtggctcatgcctgtaatcccaacactttgggaggccaaagtagggggatcaactgaggtcaggagttcgagaccagcctggccagcacggtgaaaccctgtctctactaaaaatacaaaaattagccgagcgtggtggcacatgcctgtagtcccagcaacttgggaggctgaggcaggaaaatcgcttgaacccaggaggtggatgttgcagtgagccgagatcatgccactgcactgtagcctgggcaacagagccagactgcatctcaaaaaaaaaaaaaaaaaggacaggcccccgcggtggctcacacctgtaatcccagcattttggtaggccgaggtgggcggatcacctgaggtcaggagttcaagaccagcctggctaacctggagaaaccctgtctctactaaaaatataaaattggccaggtgtggtggtgggcacctgtaatcccagctactcaggaggctgaggcaggagactcacttgatcctgggaggcagaggttgcagtgaaccgagatcacaccattgcactccagcctgggcgacaggagtgaaactccatctcaaaaaaaaaaaaaaaaagaataatggaaaagcaaaagttctgtcttaggccaggcgtggtggctcacacctgtaatcacagcactttgggaggctgaggcgggtggatcacgaggtcaggtgatcgagaccatcctggctaacacggtgaaaccctgtctctactaaaaacacaaaaagttagccgggcgtggtggcgggcgcctgtagtcccagctactcgggaggctgaggcaggagaatggcgtgaacccaggaggccgaaattgtgccactgcactcgagcctgggcaacagagcaagactccacctcaaaaaaaaaaaaaaaaaaaaaagaagttctgtcttaggtcaccccaagtgacttgcacttacctcttgtaagggcagtggttctgctgcaacttttcccagctcagccacaggctacctcctccctagcaaccactcctgaacctagtcctcacaatttacagcttcctctccatgaacactagaggttgacctagggcaagcctcaccttgcttgcttgtcttgttcctttcttatccttaacaccgtcacaaaaacaaacaaacaaacaaaaccctgtgtcaaaggactcccctggtcaaggaatttttagtacctcccgcattcaggtttgctgattgccttgtaattttggccattttttataaagccttgaaatttaaagttttatgtcgtcacatctatttatgtttcttcttttgcttcttctcttattttaaacttagaaggtctcccctctgatctagagactcagtagccatttttatatacttttagagtggttttttatgggttcatttttcacccttaatttaactacttgatctatttgcaatatttttctttttttttttttttttttttttttttgattttttaagaagtcaattttttaaattgggaaaccaacataataaatctaaacttattgaaaaatgaaatcagtaactaatcttctctgtttcattccaactttagtatatatgcttccaaagtaagaactcatttacgatttttttttttttttttttttacagctatcacgggtgattttaattttcaactttaggcttccattttcaaattccacaatgaacacataaggtggagttctggtttcaacacacacacacacacacacacacacacacacacactcctgcctcctagtgggcagagatttttgttcacaaagaatcttctgccaaatgcctccgaggtacacgtaggtcttggggagcccatgggccaactgttttgtgggcactcctgtcttcggtaggcaggttcttcagagctttgagacctccacaaccttgcgctgctctcctggggcagccttcatgcaggggtgtcctgaggacttcccagggcacccaacttcagcactgtcatccagtgtgcgtttcacggaactttttttcccaggagaaataactttatttgaactgagagctggagaatgagacaaggacttgagacagcatgagtagaggtgaggttccaaaacggcagtcagagctcatccaccaaacagactccactttcccagcaaccttgcagttagtgccaccaacaaaaggtccactgggaaatatatttgccacaaaattacccaagtatgccaacattacaaaaaagatacagatttttcatcgtaattaaatttccacaaaacccccaaatcacaagtgttttgtttttttttttgagacggagttttgcttttttcgcccaggctgtagtgcagtggcacaatctcggctcacagcaacctctgcctcccaggttcaagcaattctcctgcctcagtctcccaagtagccgggactacaggcgcccaaaaccacattgtggggaaaagaaagagagatcagactgttactgtgtctgtgtagaaagaagtagacataggagactccactctgctccccactaagaaaaattcttctgccccgagatgctgccaatctgtaacccttcccccaaccctgtgctccccgaaacatgcgctgtgtcaactcagggccaaatggatcaagggctgtgcagggtgtgctttgttaaacaaatgcttgaaggcagcatgcttgttaagagtcatcaccactccccaatctcaaaccactccccaatctcaagtacccagagacacaaaacactgcagaaggccgcagggacctctgcccaggaaagccaggcaccgtccaaggtttctccccatgtgagagtctgaaatatggccttgtgggaagggaaagacctgaccgtcccccagcccgacacccgacacccgtaaaaggtctgtgctgaggaggattagtaaaagaggaaggaacgcctttttgcagttgagataagaggaaggcttctgtctcctgctcatccctgggcaatggaatgtctgggtgtaaagctgattgtatattccatctactgagataggagaaaaccgccttagggctggaggtgggacatgctggcagcaatactgttccttaaggcaatgagatgtttatgtatatgcacatcaaaagcacagcacttttttctttaccttgtttatggtgcagagacatttgttcacgtgtttaccttccgacctccccaccattatcctattatcctgtcacgcccgataatgagcaataaatactaagggaacgcagcagccggggctggcgtggatcctccatatgctgaatgcctgtcccctgggcccctttttttttttttttttttttttttttttttattgatcattcttgggtgtttctcgcagagggggatttggcagggtcataggacaatagtggagggaaggtcagcagataaacaagtgaacaaaggtctctggttttcctaggcagaggaccccgcggccctccgcagtgtctgtgtccctgggtacttaagattagggagtggtgatgactctcaaccagcacgctgcatctgtttaacaaagcatctgtttaacaaagcacatcctgcaccgcccccaatccacttaaccctgagtggacacagcacatgcttcagagagcacagggttggggataaggtcacagatcaacaggatcccaaggcagaagaatttctcttagtacagaacaaaatgaaaagtctcccatgtccacttccatccacacagacccggcaaccatccgatttctcaattttttccccacccttcccgcctttctattccacaaaaccgccattgtcatcatggcccatccccaatgagccgctgggcacacctcccagacggggtcgtggccgggcagaggggctcctcacttcccagtaggggcggccgggcagaagcgcccctcacctcccggatggggcggctggccgggcggggggctgacccccccactaccctcccggacggggcggctggccaggcagaggggctcctcacttcccagtaggggcggccgggcagaggcgcccctcacctcctggatagggcggctggccgggcggggggctgtcccccccacctccctcccggacggggcggctggccgggcagaggggtcctcacttcccagtaggggcggccaggcagaggcgcccctcacctcccggacagggcggccggccggaaggggggctgacccccccacctccctcccggacggggcggctggccgaccccccccccccgcctctctcccggacggggcggctggccgggcagaggggctcctcacttcccagtaggggtggccgggcagaggcgcccctcacctcccggacggggcggctggccaggcggggggctgaccccccctcccccctcccggacggggcggctggccgggcggggggctgacccccccacctccctcccggacggggcggctggccgggcagaggggctcctcacttcccagtaggggcggccgggcagaggagcccctcacctcccggacggggtggctgccgggcggagacgctcctcacttcccagacggggtggttgccggacggaggggctcctcacttctcagacggggcggttgccaggcagagggtttcctcacttctcagacggagcggcggggcagagacgctcctcacctcccagacagggttgcggcccagcagaggcgctcctcacatcccagacagggcggtggggcagaggtgctccccacatctcagacgatgggcggccgggcagagacgctcctcacttcctagatgggatggcagccgggaagaggcgctcctcgcttcctagatgggatggcggccgggcagagacgctcctcactttccagactgggcagccaggcagaggggctcctcatatcccagacgatgggtggccaagcagagacgctcctcacttcccagacggggtggcggccgggcagaggctgcactctcggctctttgggaggccaaggcaggcggctgggaggtggttgtagcgagccgagatcacgccgctgcactccagcctggacaccactgagcactgagtgaacgagacttcatctgcaatcccggcacctcgggaggccgaggctggcggatcactcgcggttaggagctggagagcagcccggccaacacagcgaaaccccgtctccaccaaaaaaaaaccgaaaaccagtcaggcgtggcagcgcgcgcctgcaatcgcaggcactcggcaggctgaggcaggagaatcaggcagggaggttgcagtgagccgagatggcagcagtaccgtccagctttggctcggcatcagagggagacggagagggagagggagagggagagggagagggagagggagagggagagggagagggagagggagagggagagggagagggagagggagagggagagggagagggagagggagagggagagggagagggagagggagagggagagggagagggagagggagagggagagggagagggagagggagagggagagggagagggagagggagagggagagggagagggagagggagagggagagggagagggagagggagagggagagggagagggagagggagagggagagggagagggagagggagagggagagggagagggagagggactatttgcaatatttttcaagtatatatgaggaagaggccaagagtgttcctttttttctaaataactaaagtgcataaatcttttatcacatattaaagttccacatatcttagggtctaattctggtcactcttatctttcattaacctgtctgtctattcttatgctagggatactctgttttgggggggcgcggtgggggtttgaaatagagtctcactctgttgctcaggctggagtgcggcagcacattctcagctcactgcagcctccacttcccaggttcaagcaattgtcctgcctcggcctcctgagtagctgggactacaggcatgtccaccaagcccggctaatttttgtgtttttagtagagacagggtttcaccatgttggccaggctggtctcgaactcctgacttcaagtgatccacccacctcggcctccctaagtgctgaaattacaggcttgagccaccgcgcctgagccaggatactctgttttaactgctatgattttgtaatatgttttcagtacctagcaaggttagctgcctatcccacctaaattactgtttttaaaaatcttatacagtctcacctgtgtgctctttcaaatgaccatcaaaaaagaaaaacattaacacccctgaaaattcaccagaagcaaaattaagaaaagggtgtaatgacaagtcacagacttcaaaacatggctattgaggaaggaaacaaaagattctgccagagcatggcaaggcttctaatatcactgtagcctcccacccaccaagactatactaaaaagaagaggattggacaaattcctgtgagttctcctcaacctggggcaaagaagactcaacaggtaagtaagtatcccaaggaaaagtctagaaaaaacctgtcagagtacagactcctgtcagagtacaaactagcatatctcaagatctctgtggaagagctgatggttcctaggggttactaggaacctgtggacctagaggtattccaccatgggaataggatgcatggccaacgagatgggttaatttgtggtaccaaacatttaacagcattttagaagagagagtaaaagccaggttacccaacaaaggctgcacaatccccagagtctgcttctattctctcttccctccgtctcagaaaagtggaaagaaaatgagatttcagctcttgctctgtggctgggaggtgagacatgcaagtatcagagatggcagtcatgctcactgtatcagagcaaacaaagtctagaaagacccacgttcaacacaagcaagctggatcagccaggtatactacagaaaagcaacaaaaaaaagaaatgaacaacatgccaagaacccagtctgggaaatatatatatatgtaatatatatatatatatataaatatatttgctatacatacattatctatatttgctatatatatgtatatatataccaaaatttagaaaaacccacaaaactctccatgaattcctgtttttggaagactgtgataagaacatgaataaaataaaacaagaggaagttcaaagataagaggacaaatcaacggaatttcccagaacattgttaaagttagaatggtgaaagcaagcacccttgttttgtaccaattttaatggggatttatttagtgttttgctattaattataatgttggatattatttacaatttgttattctttatcataccagggaaataacattctatctttaagttatagttttttttgtttgttttgttttgttttgttttgagatggagtctcactctgttgcccaggctggagtacaatggcactatcttgtctcacggcaacctccgcctcccaggttccagtgattctcctgcctcagcctcctgagtagctgggattacaggcgccagccaccatgcccggctagtttttgtgtttttagtagagacgggatttcaccatgttgcccaggctggtctcaaactcctgatctcaggtaatccattggcctcggcctcccaaagtgctgggattacaggcatgagccaccgtgcctggccttaagttatagaattttttagataaagaaaggttgagcattgacttaagctatttcagctggcatgaacaaactattttggaaggcccttattttctagcaccacactacaaagaacctcagtgcagtcctcagaacttgcccacgtgaaagatgagtgagacatttcatcatattttctttaaacaaccggactttctgccacataacaaattgaatgactcattttacaaaggcaagttcttccattaccggtatttacaggattgctaacattaaggctacaggttgtataactctatcccccaatgtcttgaaactataaagaaaaaaagtccaatgaaattggggtttatttttcataacagcatagcttttggtatcaggcagctctggctatgaatctttgctctacaatttactagctgcagctttgagccagttaattatcttctctaagcttcagttttcttatctaacaatggggtcaatgatatttaatgtacaagatgttgtaaagagtaaataaaataatgtatttcaagcagctacttcaaaatgataattatattattatttctatttttaagattatgatgtacccagtataaaatagacaataaatatttactgaataaatcaatgatctttgtaaagaattcaaagatgaaatacaaagtctctgtccacaagggatttctaagctaggaggttaattgctaataaaatacatgtaagtgaagctagggttttaggtgtaatcttatgggtgcctaatgacttgactctattatcctgttgccaagttttcttcctaactgagcctgagcttggtgcctgggcacagtcacagtttaatttccaaccctgtgtactttttatttttatttacttgtttttttgaggcagagtctttctctgttgcccaggccgaagtgcagtggcactatcttggctcactgcaacttctgtctcccaggtcaagtgattctcctgcctcagcctctcaagtagctgggattacaggtgcacgccaccacaaccagctgatttttgtatttttagtttcaccatgttggtcaggcaggtctcgaactcctgacctcaagtgatctgcccaccttggtctcccaaagtgctgggattacaggcatgagccactgcgctcagccccctgtgtactttctagatgtacataaaataaatacaagctaactcacattaaaaggagagatggcataaaaatacaggaactggtgtcttacggcccccgtgggttgggatatagttaaatctcaggaaggactgaaccaaaaagtagaaagcatccaagatctctctctctctctctctctctctgactttcaattctgtttctctcaaagcctctacctttctcacagctgggcctcttcttgttctacactgcagggcagaaggacccatgagtcctgaatctgcatgttttacatccatcctaattcgtattcctggaggaatctggtcggcccagtatcttagcccattttgtgctgctatagcagaataccacagactgggcaatttataaagaacagaaatttgttggctcacagttctgagggtgagaaaatccagtggctcagacctataatctcagcactttgggaagccaaggcaggaggattacttgagcccagaagtttgagaccagcctgggcaacatagcaacactcaaatctcaaaaataaaaataaaaaatgtctgcagaaaatgtcctaaatttgctgaaagacctatatttatagattcaagaagtttaatgaaccctaaaatgggtgaaagttgaaaacacccagacacatcataatcaaactattgaaaatcagaggtaaagaaagcatcttgaaagcagctggaagaaaaaattataaattacacataagggaaaactatgactgcaggtttctcatctgaaaccatagagcctttgagataaagagaaaaaaaaatatatatatatatacacacacaccatgggtcccagaagacagaaacatctttaatgcactgaaaaaaataaactaaataaaataaaatgctagaagaaagaactgtcaactgagaattctatatccagtaaaaatatatttcaggaatgtagaaaagatgaaggcattctcagatgaagaaaaactaagagaattcatcatcaacagacttgctttaaaataaatgctcaataaagtttttcaggttgaggagaaattacaccagagagaaacacagaacattagaaattaataaagaacaaaggaaatgatgaatatctgaatatgtatttttctcctcttaaattctttaaaatatatatatgactgacgaatgcaaaaatcataacattgcctataatgtttcagtgtatatagatgtaatatatatgacaactacaacataaaagaaagtggatagaggtactaatatgattataagccttctacggtttactgcaagtggcaaaatattaactttatgcacactgtgaaaagttaagtacattgtaatccctcaagcaaccactaaaaaataccacaaagagatataggcaaatacccaataaataaattaagataaaatattatgaaatatttaaacaatccaaaagaattctggaaagagaataaaacagaagtggtgaacagcaaacaaataaaacagtcatccatcttaaattcaacaattttattaaatataaattgtctaaacaccaattaaaagacagatatttttagactggataaaaattatacccaactacatgcagtctgtaagaaacacattttaaatacaataatatagatatatttaaagtaacatgatggaaaaagatataccacaaaaacactaatcaaaagaaagttgaccaggtgtgatggctcatgcctgtaatcccagcactttgggaggccgaggcgggtggatcacaaagtcaggagtttgaaaccaacctgacgaatgtggtgaaaccccgtctctacgaaaaatacaaaaattagctgggcgcagtggcatgagcctgtagttccagctacttgggaggctgaggcaggagaattgctcatggtagaggtagcagtgagccaagatcacaccactgaactccagccagggccacagaacgagagtctgtcaaaaaaagagagagagagagagagagaaagaaaaggaggaaggaaggaaggaaagagagagagagagaaagaaaggaaggaagaaagaaaggaaggaagaaagaaaaggaagttgagtgcgtatgttatttttagacaaagtagacttcagaacacagaaaattatcacagataaagaaggacattacataatgataagagagtaaatgcaccaataagacataatactaaacatgtatatatctaataatagagcgctaaaatatatgaagcaaaagctgacagaactaaagagaattggacaaatccacaattgtacttcaaagcatcacaggaccattaatcctgaaatcttgacctcagtttctctcaggcctcttttggcctcagttgactctctctgtgcctctggttccacaaaggaataaccctgccccagagagtttagggtaactgtgaaagcgtgttctgtaaggagcccaccccaaccagatgtgagactgtgagcatagccagactttagctacttgttgaaattttagagaaaatcaataggaattttccagctatgtctctctgggaaactcatgaaagctcaaacacagcattaagagtttgttgtggacaggtattattttgcatctatcatccactctcctatttctgataacagtgtcccaattttgctttagggaaaatacctctacatacccctaacttaagctgcaattaagtcaatatgaatatttcatcctcctgactcagtgattggtcagaaacaggcacacaactcagccagagcaatgagatgcaaggttacacttgctggggcatctgggaaagagagcttcctctctcctctttgggcatcaccagaaaacatgatgtccatttagccagatggtgtggcttggggatacgagagctgggcaggccacagtctttttgatatcgggagggaaaccctagaactatactgtgtagcacctgagggtaaagcctacactgcggaaggcagaacagaaggacatacagaaaagggtcttgattgttttgagctttggttcaaaccttatctaaagacagaacaactctggtaatttctattatgcaaaggaataaatgtttccatttttcctttatttttcttgcttacagtagtttgcataatattttgggttttctgttgtgaatgacattcacaacacagagttctgactaacacaaggcttactctcacctcttcatccctctctaaacctcatatctatctttctcaaaaaataacaacaaaaatggaggcgggcagatcacaaggtcaggagttcgagaccagcctggccaatatggtgaaaccctgtctttactaaaaatacaaaaattagcctggcatggtggtaggcacctgtggtcccagctactcgggaggctgaggcagaagaatcgcttgaacctgggaggcaaaggttgcagtaagccgagatcatgccactgcactctagcctggcaacagagggaaactccatcttaaaaacaacaacaacaacaaaaagacaaagctttatatgtggaaaaaataataccttaatgattagcaatacacatataagagagaattgttcagaatttaaaactgtaagcaaaaagatagttttttaaatttatatattgatagagaatgctatttactctgtttttgctaaaatctttgaagaacatcactggagttattgtctcctgagagaatgtttaccaccatcaactacctcaacctgtaattcttaaagaacaataataaattcaggaggcccagtcttccctgaccctgttggtactcaaggagacaatggcttcagaattcctccatgggttttgcatttcaggctcaagctaccttcttgatgaaaaattctggacgtgttctgaaaatcacagtcatccctaacttcagtggaaaagattcatattgtccagctgaacaaggattgatacttaaaaccagggatttcctaaaatgaaaatgtttctgtggataaaactgattacatgcagagactggaatggagttaattctgggtagatatgggattcaagagattggtcttcatgaggcatttatcaaggatctgcaagggatttagaggtgacggaagcacagtccttcctgggcagttgcctctagcctggtgggaggtgttcctcacacccaggactctcatccatggcaaaataaaaagtgagatatcgactgggcatggtggctcatgcctgtaatcccagcactttgggaggtcgaggcgggtggatcacctaggccaggagttcgagaccagcctggccaacatgacgaaaccccatttctactaaaaatacaaaaattagccatgtgtggtggaatgcacctgaagtctcagctactcgggaggctgaggcacaataattgcttggacccaggagaaggaggctgcagtgagccgaggtcgtgtcactgtactccagcctgggtgacagagtgagactccatctcaaaaaaaaaaaaagtggatatcacatcagagaagctcctggccaggtggccttgaggaacagggatgagttcggcacttagagatggagttggctttccccgttggagggaaaggcatgagaagggacataggtaagaggaagtagagtagtgcaggggccattgagtagtagtccttccaagacaggacgtcatcatagaaccactttctctgaggaagctctgcttgggggaggttttaattcatgaggaaggcaaattcaatggctctcaggtgaggtgggaaacagacacctaccaacactccaaagagaacatgtacctctataaaagggcacagtctagtgaacaaagtccacagctctgggtttgatttctagcactgtcacttaatactgtgtgaccttagacattcacttaactctctcagcctcaggatacaatctgtaaaaacaggagaatgcttgttccctgtgccttataggattgatatgagcatcaggagagacagtgggcacaaaatagcactgtcaactacttctttctagtcagttatctggtcatgtttgtgaagctccccaggactgggaacatagcatatgatttttttaaagttactcgatgaatgaatgaataaatgaatgagtaaatgaatgaataatatctaaaggcctccaactaaataataatcaacttcctaaccgtactgaaagcctttaattgactttggggctgtttggcctggaggaggctctgagttagtggtgatcagttggtgtcatggtagagaagaaagcctgtgaaggtggagtcattgtcattatcagcatagagtccattacgctctccttccccatacacctggagccagacttggtcgcccacctccagatgcaggagcacagagccggaggcctggtccacattattttcctggtactgatcataggtgaagagcatagccttgtccttcttgaagaggctgaccttcacatccttcatatagactgtgatgtggtaggcaaagtagtacagcccaggaatgttgcagtggaatttaccagtggagccatcatagtggttttgctgattgtagaagatcttggtaaagcgaatgggcatgttggggatagtaacgtaagtctccaatcccacactgaatgctgagcggtatacataggcaccttctccaggttctcctttcctgccttggattcccggaaagcctcggggaccttcagccccgggtactccggtttcaccgatgtctcccttaggaccaataagacctaaggaatgagaagacctcagtgactacaaagaacagaactcctgcctaggttggttacagcctaaattaccatccctgtggctcccactcacaaccttcttgacttatagatcaagaaaccaataagagctcccaaaaggagagaggtgttacctcctccttctatatctcccacagacatggaggctcccataatttcaactctatctttatctcctataggtctctatcatagaccctccaccctgccagccctttatgtgctggcaccatcaaccctggttttgcaattctaccccctccatctaggatgtctctcctcctctattctgcctacccatcattcaaggcctagctgaagctctgcctcctccttgaagccttcattcttcatcaggtccacggtgagtatattttctctatgctccatactttgaatacttgttcacattcagtttgacatttttagagtagactttcttgtagtaaccaccaacagagccttgcacattagacatcttacctagatcaagagttccccaaaggcaggactgagcctttcagggggtgtgcagtaaatgtggttgaatgccactgggtgaaatggaagttaagcagacagaaagaggaatcagaatatgaatgtactgggaatagggatgagggtgaagatgggaaaggggatggaaaaggagctgcagatgcagcaaagccaaagtcttggttatagaggcaccatctacactcatccttggaagaccaaccccaaatcacttcaggttgcttatggttaacataaaaaagctttgctttctccctgtgtctaggccttagttaataatgaatgccttcatatagtttatatcagtgtaggaggtctgtgatgaaagaggccagaaacattcttacctggatctcctttctcacccttctcaccaggggtgccatctctgccatcacggcctggggccccattatggcccggatgccctgggatgcccgccatccaacctgtgcaggcccccttgggcaggggaagcaggactccgggcccttgagtcgtggtttcctggtcatgaccgggcagagctaatagcagtagaacagctcccagcaacagcatcctgagccctggaatccacatgtgcactgtcagccatggagagacagaccccacacacacacccagttgggacctacaaaggactccgtccatctcagcagagtctacttctaggagctgctttctaagtattcaacttttccaggaagacttttctgaatattgcagcccaccttgatctctttctgccctgaaatctgtaatacttagcattattccctgtgtgtagtctcctttcctcaccaagattatgaattcagtgattgcacagatgacactcctctaattttcccatgtctgagcacaggaccaagcacagggaaagctccaagagtcgacttgccaagaatccatccttgggtttcccaagtacgatgacacagattgctccattcaatgctaaccagcttctctcctctggctcctttcttctttttctttccccccttctctctcattttctgtgtctattcctccttcttactctctcattctctttcttcctctacccctctcctggggcacatgtttgactattgggtatattacatttgcacacatgcacacacacaaacacacacagagaaaaagagagagagagggagggagagactcaccttgtgttaagcagacaacgagagacacatcatcccatgaacatatcccctggccctttgtttgcctgagccatctttagctgcccctcctcccctgtctaatctctattcagctttcaggacccagtttggatgtcatctgtttcaagaagtcctccttgttctccatctcactccttggctggttctttcccctctgtgtttctccagtgccctggtaatatggtttgggtctgtgtccccacccaaatagcacgtcgacatgtgttggagaaggggcctggtaggaggtgactgaatcatggaggcagacttatcccttgctgttctcatgatagtaggtgaattctcacaagatctggttgaaagtgtgtagcacttcccctatattctctctctctctctttctctctctctctcctgctgctgtgtgatgtgcttgcttccccttcgctctttcttccaccatgattgtaagttttctgaggcctccccagccatgcttcctgtacagcctgtggaactgtgagtcaattaaacctcttttctttataaattacccagtctcaagtagttttttacagcagtgtgagaatggatttatacacctggcttagctctatcattgcactctgctgtaatttctgttttgctcacccatttctccattaaacagcaagtaccaggggacaaagactaacacactaatagcagagtagggactaaataagcacttttataatgaggaaaagaaatcatgagagagccagagaaaggaagggaaggaggaaggaaaagaagaaaggaagataaaaaggaagagtggaagagggaaggaaggagggagggggaatgtatttgaaatatgtattctggagccctagcaaagagctcaagtggcacaggtagtcaaaagcctccctgtctcaaaatcattctttgatatccccctcccagaaaagggcccaatacaggtatagggacttttatcccctctcagattctgcctccgatcttagggggatcttaggcctccacctcagattgctgaggtcttagtcttcccactctcaccaaggagttgggagaaagcatctcacagagagaaataggtcctaggatcctggattagaggcatcactaagaccctctgtgggttaatgtggttaatcccaagaatctgattctaaacaaagtgtagtccatgtactttattttaccttaaaaattcactatttttcatcagtttgcttgtctcttctagattatatgaagtctccagaattaggtttgtcttcaggacaactgaaggtttgttgaagacaaacctactcctctgtgagggatggaagaaagaccgtgattggcaatctcaccccaaaaacatgggcctggtatctggaatcccactcctatgccccattacctggggttctatactaccctcttcacgtggcacatccaactcatctttcatctttatcatatatatgagataaattttgtatatacatataaactatatgtatatattacatatatagttcattaaaaataatagttatatagttctttggacatgacagaaaagaaaacaatactcaactccaagaatgtctctgtttatttttaaacatagtggaatcatactttatgtaaaactttattcctttattttgtctttggcattttctagtttttataatgactatttttaacgtctcagagtgagtgctagtctagtaagtggatataatcaatatatatttgaccatttatatttcatcaaacttttagcatattttcattttaaaatattattttatattctgtaagaaattatactttgatttttaaataatattttaaatatccttaggcatgtagctttccccaagattattattctgttatgacagattcccagaagtaaattactggaccaaaaggtatgcacatttttaagtctcctgatacatatccccacatggcagcatatgttatactgccaaccagtagtacatcattagtgtgtgtataaaagggcataccttaactaccctcatcagctttgggtattataaaaaacatttgtgtgttgtcagtttagtgagcaaaggaaataatggtacctcactgctctagtttgcttttttttttttttttttttgagagagaggatttcacactgtcacccaggctgtagtgcagtggcacaatctcggctcactacagcctccacctcccaggttcaagcgattctcatgccttagcctcccaagtagctgagattacaggcatgcaccaccacacgcagctaatttttgcattttttagtagagacggggtttcaccatgttggccaggctagtctcaaactcctgacctcaggtgatccgcccgccttgggctcccaaagtcctgggattaaaagcatgagccaccacgcccagtccttgcctctaagtgttaaacagttcttattcatgctaagatttagtaagtattcaattttcttctgtttttttctattgtttgatatagttaaaatttcactttttaatgtagctctgattttttgttttgatgtaagctgtgacctaaggtactcaaatgatttctccccacttgaagactagctgttacaacacctttaattgcattaattttttctctcactatagatctgatgcatcatttatcaaatatcaggttctaatatgatcttataagtaaagtaaccattgataatgaaatggcagacagagagaagagagacagaaacagcaacagaaacaggtgcaatcagactcaggtgctgcccctttaggtgtcatgagtctttatttaagacccactaccatcatttatatgtacatttgtcgccctctactgaatttgaagaattcaggagagtgttctcaatagcttctggaaataaaatgagaaacagcttaggtttgactagtctcaagataagaaaaaagaggtgagctacatgagaagccaaggggagaccagcaaagccccttttgcattttaggagaattcttgttctgagactttacagatttcatgcatctttaaacttcctcactgcttgtcacctccaccctttcttattatggctttggcaataaaactcctgagaagaactttgagctccatgcatgtttttctccagaaatgggaagaatctgtgaggctccatccttttctgctgggaaacaggaggagagaatccagaatatgtgaaagccccagagataaagggtgacggggggcttaccccaaaccttggagagagggcaaactcaggggtctctggagttttctggctcctccccctttgtcaaaaataaagatctctttctcctaccctaagggaacactgtttgtccccaaacttcagtattatggacagatttctccactaataggtgcgatcagcctgggttccatgacagtggcacggggtagaggtgccaaaaatacaagagtgtgattagcacaggagcctcagaagtttccaagaccaagaacggactctgattgtaaaagaaagttgcattccaacttaattctgggtgggaaaccagcaattaataacaattgaaggtcagtgcaaacgtgcctaattttcaaaaaaattttcaaaattatttgtgttcttttttattttacttatttatttatctggagatggagtcttgctctgtcgctagcatcttgcgctctccaagtctcaggagacacattagagtcaaaagcagggctttgggaagattaggtaaaataagttttgaaaatgccacatgaaaatgatactccaaggaaccctcacccatgtcagcgttctcatgttcctcatctcacataatcccgtttagcggattaggaagctgagtctgagaagctccgtgtcatgctttcggaggcaccgtgatgcgatggaaagctcaccgatttggaagtcagaacagagtctctcagggatcgtttccttaatctctcagtttcctcatctctaaagtgggggtcatatatataaaacgacaaacatataaaaatacctatttttttagatattgccattgttacactttgcttgttacccttccttccttccttccttctttccttccttccttctttccttccttccttctttccttccttccttccttccttctttccttccttccttccttctttccttccttccttccttccttccttcttttctctctctcttttttttttgtttctgaagtggagtctcgctttgtggcccaggctggagtgcaatggcaccatcttggctcactgcaacctccgcctcctgggttcaactgatgctcctgcctcaccctcccaagtagctgggatcacaggaatccacgaccacacctggctaattttttgtatttttagtagagatgggatttcaccatgttggccgggctggtctcaaactcctgacctcaagtgatccgcccgcctcggcctcccaaagtgctgggattacaggcatgagccactgcgcccggcctgttacactgtatttctatcagaaaaaaattattactaagtaatagtgagtactatgatctaaaactcaattatgcctaaaaagaaaacttttacaaggatcaacaagctaaatctcaagtgtcacaattctttgcctttgtaaaatgctatttgttgtgtccctgtgggcttagcatggcactaaaagttcctaagtctcaactctggttatgtgtcatttagtgactcaggaatctgcttaattgtttttggtcacaaagcttttggcaacgaaggagtgatgaagctaagcgcacccttgaagtgtcataaaaaaaaatgaggtagtatgatcagctgtacagttagagcaataaaaagtccaggcagaccttctgattcaccataatcaatttaagatttcttaatgtttctttcctggcagcatacaaaaaggcaaaattaataaataacatagttgttgtataacaaattttgttactttttataaaacaaagggatctattttatctgtattaaaattaaaaattttgtggactttaaaaaatttttaaaatgctatttataaaacccttttctcacctagtgtctcattcgattctcacaatcattttgagagacaggatagggtagaatagggagcacgggctctacggtcttggtgcttaggcacaaatcatttgttctgacctgtaatgcgtttcagtgttctgtttgttggaagatcaaatggtgtagtctgtgtaaaatgcttagaatggtgtctggcacatgtcagtgctcagtaaatgttagtgatgagtgtatgcattttagagatgaggaaaggggacttcagaaaggttaagtggctttccaagatcccagagctacacagagaggagtcggaaattaaactctgatcttcagaacccaataacagactcttagacatagtccaggaggagaaaagtatcgtggtcacacatcctgcctttcaatatgccaccccatggggtgagggatacaagaaaaaagtagcataaaaagacttccactgtaatcccagcactggctttcctggcaaacctcgcacaggcatggattcatctgcttttaaaattataccaggggatgaccgtgatgttctcaggatcctaaagggccatactgtgatcatttatcttcatgttaaagtgtatgagaaatttcactttgacctactggaatttcagttgcaacagcagaatcctgtgaaatgcaaggacagggtcccctctgggactggcaggaggcagagccgtgtgggggaaagagatcaccaaacctggtgccaactcttccagcagaaaagggcattaaagcacacaaaattggccaggcacggtagctcacacctgtcatctcagcactttgggaggctgagatgggtgggtcacatgaagtcaggagttcaagaccagcctggccaatatggcaaaaccccgtctctactgaaaatacaaaaaaattagctgggggtggtggtgcctgcctgtaatcccaggtactcaggaggctgagacataagaattgcttgagcctgggaggcggaatttgcattgagctgcactccaacctgggtgacagagcaagactctgtctcaaaaaaaaaaaagtatacaaaatcctcaaatgtcagagccaaaaggagccccagaaatcacctcacccctgccttgcttttacaaatgggaaggctgaggggaaggagtaggaatgcacttattagaaccttatagaagccagttcccatgctagattttacacgttatttatcttcatctttacaataactccatgaaggaaggaaatgagcccaacttcagagatgaggaaactgacagattaaggagatgatccctcagagactctgttctgacttcctaacgagtgagccttccatcacatcacggtgcctccgaaaaagcactacacggagcttctcagactcagcttcctaatccgcgaaatgtgatcatgtgagatgaggaacatgagaacactgacactggcgcgagttctttggagtgtaattttcataaggcattttcaaaatttattttacttaatcttcccatagccctgcttttgactctaacgtgtaggagaacctgagacttggagagggaacgatgctagctaattcaaccactggattgaattatatcaaactcccatttttaaaagtcaaaatgggccgggcgcagtggctcatgcctgtaatcccagcactttgggaggctgaggtgggtggattacctgatgtcaggagtttcagaccagcctggacaacatggtgaaatcccgtctctaccaaaaatacaaaaattagtcaggcgtggtagcgggcacctgtaattccagctacttgggaggctgaggcaggagaatcacttgaatccatgaggcagaggttgcagtgagctgagatcgcgccactgcactccagcctaggtgacaagtgtgaaactctgtctcaaaaaaaataaaaataaaaataaataaaagtcaaagtgtagaatattggcagtttcacacggtgcaacccaataataaatggcataaccaggaatcaactcagctttgcctagctcccaggagctttgcccgaaagccttcactcagccctgggagagctgtcaatatctccatgcccaacacacacacatacccgcacccatacacacacctccacctatgcacgcgcacacccacacaccacatccacacatccacatacgtacgcaccacccccccccacacatacacacccatccaaatgagtgtgcgcgcgcgcacacacacactcacacacatacatactgtcaaggaactaataaaacagagcatcccacgcaccaccacatttttaggataagtctctctccacatgattgaatttctgattgaaattcctgattgaaagtatctctccaaaagacatcacctcttgactttagccgtatgtctgggaccaccggtccactggcttgacaaggagtaggtggaaagtttgtccctacagccaccttaaaaagagcaagcatataatcccagccttttgggaggctgaggtgggaggactgctgagcccaggagtttgaggccccccagccaatatagtgagacctcatctctacaaaaaatttttaaaaattagccaggcatggttgcacacacctgtagtcccagctactcaggaggctaagatgggagggtcacttgagcctgggaaatcgaggctgcagtgagctgtgattgcaccactgcactccagcctgggtgatagagtgagaccctgtccccaaaaaagacaaggagccagtcttgtgtctatttttttttttttttttttgagatggagttttgctttttttgcccaggctggagtgcaatgctgtgatctcagcttaagactcctcggccaggcgcagtggctcacacctgtaataccagcactttgggaggccgaggcaggtggaatatgaggtcaagagatcgagaccatcctggccaatatggtgaaccccatctctactaaaaatataaaaattagctgggcgtggtggcgcatgcctgtagtctcagctacttgggagactgaggcaggagaatcgcttgaacctgggaggcggaggttgcagtgagctgagattgtgccaaaaaaagactcctcaagacttaaggaagagtggcagcagggactgctgaggaagctgccgggctccctgtgtaccactggccttcatgaacaaagctgacaccatcatgctccttcggacatattctgctagcataaagggacccccatctccccaaccgaattaggcagagctggccttccttctagcggagttcctaggagtgagttggtgccaccccttgtgaggcttgatccaaaaaccagaacctctccagaccagggatccatgtcctctaacacaagaggggcagacctaacctctaaaatccctcccactctaaccttcagcatccacagctcaaaacaaccaggatgcctcagaaacagcactcactggggcgagcaggattaggcttcagaaaaaccaggtagatccagtttcttctgtcagaaaatgtttttttttaattacaatttttcataagttgccactatatgccaggcttttctcattttatctcattagagcctctttttcttttctttcttttttttttttttttgacacaaagtctcgctctgtcacccaggctggaatgcagtggcaacaatctcggctcactgcaacctctgcctcccaggttcagacaattctcctgcctcagcctcccgagaagctgggattacaggcacctgccatcacgcccaactaatttttgtatttttggtagaggcggggtttcaccatgttggtcaggctagtctggaactcctgacctcaggtgatccacccgcctcggtctcccaaattgctgggattacaggtgtgagccaccatggctggcctcattagaacctcttgattaccttgtaagatatccctatacctacatatatccccaaatccatagacaacaaccatgtcacactcattgtatcttgtgaacccaatccactgtctagcccatagaatttgctcagtaaatatttgctgagtagaataaagtggcagagctggattcctaattccagtctgaagtcagtgctcagcttgacttttctgaagctgccttcatatatgcttcttcctttgccctacctggtcaagctaagaggcaatgtattcccttatcccccttaatcgaattggacttcatctgtggacagacccttccaccttactgaccctaactttttctcaataggtatcctgctacagagcgaactgggcaaaattcagaatggttccatgcatcttagaaggaatgtctgaaataaccctttctctcttggggctgtgggagaacggaggaagaagcccagtgcatatctgcctccaccagtgctgctctgaccagagtatccacctgtatccactcccacactactacggacgggagagcctgggtgatcccagccagaggctatgcatgcatcccccacccagcctggaacttcacagaattgctcttaccctctggtatggaatcagaaccacagactgcagtcagaatggaagtgaggaggagatggcccagcctcaacagcctggtactcacgggggcaggcagtccccacctcacaattgtcatttcccattggccaactcagtgagggccagaggccggtgggcaggcacatgtccctggcagttgcccacagcctgcaccctagggaacctggtacaacccagcttgggcttcggaagccaagtggagcttcagtcaaagcacttgtgtttccaggccttgacccttattttgcctcctacaacagcaacagaagatggggcaaaagtcaaaaccacagcaggaaaacaagatttttttcctgcatctgacggagaaacttcctaatgtaaatgaattaattgctcagtggtccaggaggtctccccctcccatagatttgccctaataagtcagggacgccaattatcacaccacagtcttgctcactgtgcatgattaagtctgagactgtgtacgttcagacagtgagtgcttcagaagggagcactgtcagaggggtctgcaatcaggtaagaaatagagcacatcctccactctctgacctggaccctggatttaggaaagaccttgcacatgaattctgagaactggggtgtggggaagttcctggagtggtgtggggcttggcaagttaaaaaggccctgaattcttaaagcttgtggcctcgaatcgtaatttgaatctaatataatagaaaacttacataaaatgtgatattggaataccatctttcaagattttttggttccaaaatttcggataacattttgacagctaccttggtatgtgtgtgtgtgtgtttgtgagagagagagagcctgtttttccagttccttaagcatatatatgcctattctgtctcttgtggaacccagctctggcctagaagcagcctggagaactggaagctgccacccacttaggtgttcctagaaagtttaggcttgaagtggcaacattcaacaccttggactttcttggcacgctcatgttttgtttttgaagggcaggatctgagccggttcttgcaagccacacattctgatgaattaaattacgaccccagcaagggcttaggatgccagcaccaacttcaacaagacatccaaaacagaattttctcagacagaggcagggcaagtgtctgcctgccccccagatatcatctccacagtccacacagagcctaaaaatctaccagtaaagtcaagtccaccattaaagtaaagatctgatgtaaagcctcagcttcctgctaatgtccaaatatttcaagagaagtcacattaggccgttgagatgagagacatgagagactttccaaggtcccccggcttaaataagtggcccatgaaaatgaggttccatatagtttagcaggctgattgaaccaagaagacaacaaaaagaaatagaagcaactctcaattatatcactgtttgatttttgttatggtgttttcctatttatttttggtttatgttactgtctgttgctatttaatagaacataaacttcaggtcaggtgcagtggctcaggcctgtaatcccagtactttggaaggccaagacaggcatatcacctgagatcaggagtttgagaccagtctggccaacatggtgaaaccccatctctactaaaaatgcagaaatagccgggcgtggtggcacatacctgtagtcccagctacttgggaggctgagacaagagaatcacttgaacccaggaggtggaggttgcagtgagccaagagcaccattgcgctctagcctgggtgacaagagtgaaactctgtctcaaaaaaaaaaaaaaaagtaaacttcaggagagcagagattttgcctattcaaagttgtatcccttagttcctagaatagaacctggcacaaagtaggcaataataaatgttgaattaatgaataaatgaatgatcatattcaactttcctttggagataactattattgtctttcattttacaaataatgaatctagagttcaatgagggtaaataatttgttcaaggcacaagtctaggatttgaaccagatctgtctaactaaaaatccctatgctttctaattcctcatgcccttcacccctcttgatggagtgtgaggcctcaaggttgatgtatgtgcttcagggtagtttcagggctggcataaaaagtattttctttggccgggcacagtagctcatgcctgtaatcccagcattttgggaggctgaggcgggcagatcacttgaggtcaggagtctgagaccagcctgacgaagatggtgaaaccccgtctccactaaaaatacaaaaaagttagccgggcgtggtggcaggcacctgcaatcccagctactcgggggtctgagggaggagaatcgtttgaacccaggaggcggaggttgcagcgagccgagatcgcaccattgcactccagcctgggcaacagagcgagaatccatctcaaaaaaaaaaaagtattttcttctaactttataagaatgcagctggttagagaaagctgtagctattgcacaaggtggaataactttagccccacaatcacaccaagactgtgctgggcctggctgtcagtcagtgacattgtgaaagcctagcattttgcgaggcctcagggcaatctgccacccaccacaaaggccgtcatgtggaaagagccagttctgtggcatactggtttaaagactgtaattgaaaaacattcaatcagaaatgccttgaggctagtctttttcccaggacagaactattactacttagaccgaaataaccaaataaatgcgatcatttcctccagggtaccgtagctacaggtcaagcccctgttagcatgtgagttgggatactgaaacaggccaaatcacttaatttatcttaaatatgtttaagcatggccatatatttttgcttaattatgatttttaaaaataatcttaactgaagtaaccaagcataagcactgtattttgaaaaataaagattggagcaagatggtagagtgagcacgccctgcagcaatgtacgccatccccaaacccctagaaatggcaagaaaggagaacatttctttatctttttttctttttttttttttttgagatggagtttcactcttgttgcccaggctggagtactatggcatgatctcagttcaccgcaacctctgcctctcaggttcaagcgattatcctgccttagcctcccgagtagctgggattatgggcatgtgccaccacgccccgctaattttgtatttttagtagagacagggtttccccatgttggtcaggctggtctcgaactcccgacctcaggtgatccaccccctcggcctcccaaagtgctggaatgacaggcgtgagccaccgcgcctggccaggagaacatttctttatctcttctgaaggtatggctacggctgtacttctgaagtatctcagatgataatttaagtatctggtttgctactgcatgatttggactgtcacctcctgccaccgaccagaaggccatcatgattcaagcgcagtcaatgcaggtaggcaaccctgaattcatactttttaaagcctgtgtccttggactacccccaatactaaaaaattgtactagtcaaggtacaataattttagaaaggctggagaagcaaagggagatgatattgcctaaagaccaggaatcggtgactgctcctggaccatagcctatgagcctgcgcttactgcatgtcttgctagctgctccaccattgccactgaacaggagccactgtcaccgccactgccaagggcgctcactgaaacacaacagctcctcccttcttccccacttcagtcttttcacggttgtctcccatgtgcacaagctaactggtacccatctggcaaaggaatgtaggatgtgtcatttcaggcatcaagctccaggaatacaaaagggattatggagaggtgaatggagggctaagtactaacagacatgatctggcataggtcacaatgtcaaaaaagaaaaagtgacacccaaggtaacaaagctaatagaaaaaagggtgaagcttaagaataactataattattatatcagaaagatgtcataggaatgagcatacatgaaaataattaacgtctagtctgcccacagtaggaagtgaaaataaatttctgtctttttgtcactaagttcatggtgatttgctatggcaatcttaggaaaccaatacaaggatctagggccagtgaagagttcttacatatgacaacaaaagcacaatccactaaagaaaaaaatgaaaagtgagatttcaacaaaactaaaacttttgctctgtgaaacatcctgttaagaggaggaaaaggcaatatatgaattagaggaatgtatttgcaaaccatatttgagacaagagatttggatctagattgtataaagaaatctcaaaactaaatggtaaaaaaaaattcaattagaaaatggacaaaggacatgaacaattatttcaccaagtaggaaacacaaatgacaaacaagcacatgcaaagatgttcagcattattaaccattacggaaacgcaaattaaaatcaccatgagatatcactacatgcctactagaatggctaaaattaaaaacaggaatactataatggtacatacatgtagatgcatacaattgtcaaaacccacagaatgtacaacactaggccaggcacagtggcttatgcctataattacagcactttgggaggctgaggcaggcagatcagctgaggtcaggagttggagaccagcccggccaacatggtgaaaccccatctctactaaaaatacaaaattggccaggtgtggtggcacgcacttgtaatcccagctacttgggaggctgaggcaggagaatcacttgaacccaggaggcaaaggttgtagtgagccgagattgtgccattgcgcttggcctgggcaaaaaagagagaaactccatctcattaaaaaaaaaagagagagagagagagaatgtacaacagtaagttaatcctaatacaaactatggactttagatgattaaaaagaacaaaaagatgtggagaatagagaacacaaactattttgaattaaaaatagtgagaatggccaggcacagtggtgcacgcctgtaaccccagcactttgggaggcagaggcaggtggatcgcttgaggtcaggagtttgagaccagcctgggcaacatggcggaactccacctctactaagaatacaaaaaaaattacccatgagtggtagcactcacctgtagccccagctactcaggttgctgagatgtgaggatcgcttaagcctgggaggcaggggttgcagtgagccgagatagtgccactacactccagcctaggcaactgagcaagaccctgcctcaaaaaaaaaaaaaaaaaaaaaaaaaaaaaaaaaaaaaaaaaagtgaaaatactaaatttgggaaagaatgcgtaaaaatagattactcatactttgctggtgggaatggaaaataatgcagccactctgaaaagtagtttggcagtttctttaaagattaaatagcagtaacacttctgggcatttatcccaaagaactaaaaactatgtccatatagccaggctcggtggcacatgcctgtaatcccatcactttgggaggccatggcgggcaaatcacctgaggccgggagttcgagaccagcctggccaacatggtgaaactctgtctctactaaaaatagaaaaactacccaggtgtggtggtgcatgcctgtaatcccagctacttgggaggctgaggcaggagaattgcttgaacctgggaggcggaggttgcagtgagccgagatcacgccactgcactccagcctgggcgacagagtgaaactccatctcaaaaaaaaaaaaaaaaaaaaaaaaaactatgtccgtacaaaaacccgacataaaaatctgaacatccctgtacatatatgtctttgctcatttgtaagtaaatatttaggataaatttctagaagtggaattgcagggtaaagagatatgcacatcttaaattgtacttattgtaaactgaatctcaagaatccagtattgatttatatttctcccaatgtaggatgagagtgcccatttctctatatcctcaacaatactcaattctgtcaaatttaaatatctggtattctaatagattgtgttaaaagtgccttatttttatttgtatttcttctattatatgtgattaaatgtatcatatatttattgattatttgtattttttcctggaattgtgtgtttcttcccttgtccattttccttattgaattattcttattaattttgaaaatctttttattaacacataatgtacatatttttgggatacatgtaataatttgacacattcatataatgtgtaaagatctaaggaggtcgggtacagtgactaacgcttgtcatcccagcactttgggaggccgaggtgggtgtatcacctgagatcaggagttcaagaccagtctgaccaacatggtgaaaccccatctctgctaaaaatacaaaaattggccaggcatggctgtgggcccctgtaatcccagctacttgggaggctgagacaggagaatcactggaacccaggaggcggaggttgcagtgagccaagattgcgccattgcacttcagcctgggtgacagaatgagactctgtctggaaaaaaaaaaagtaattagggtattcatcaccggcaatatttatcttttttaatgctaggaacatttgaattgttctcttctagctattttgacaggtacaatagattatcttgaactatagtcaccctactgatctatcaaacacttaggtcttatgcttctacctaactctatatttgtacccatttcaacctctcattgaattattcttattaatttttaaaagctcattgtataccaaagaaattaattctttgttatatgttttgaaaatttatctatcttttcactttaaaaaatgtttcatataaaaattttggcttgctatgcagcctaacttattaacagtttactttttgtcttctgggtctcatgtttggtctgaaaagactcctcccattccaaggggtttttttgtttttgtttttttcaacttttattttagattcaggggtggtacatgtgcaggtttgttacaagggtatattgcatgatgctgaaatttgcatacgattgaacccatcactcaagtactgagcatagtacccaataggtagtttttcaatccctgtccccctcccttctcttgtagtctccagtgtctattgtttccatttcatgtccatgtgtactcacttggctcccacttataaatgagaacatgtggcatttgcttttctgtttctgcattagtttacttaggataatggtccctagctgcatccatgttgctgcaaaggccatgatttcattctttcttctgactgtatagtattccatggtgtatatgtaccacattttctttatccactcctctgttgattaacaccttggttgattccatgtatttgctattgcgaataatattgcgatgaacatacaggtgcatgtgtctttttgatagaacaatttattttcctttggatatatatctagtaatggaattgttggtttgaatgatatatatatttttagttctttgagaaatctcctgctttccacagtagctaaatgaatttacattctcaccaacagtgcataagcaatcccttttctctgcagcactgccaacatctgttatttttaataatagccattttgactggtgtgtgatgatacttcactgtggttttgacttgcttttctctgatgattagtgatgataagcattttttcatatgattgtttgccacttggatgtcttcttttgaggactgcccaaaaagtaagcaaaggccataaatggggttatttgttttttgcttgttgatttaagttccttatagattctgaatattagacctttgtcagatacatagtttgtgcatattttcttccattctgtaggttgtctgcttactttgttgatagtttcttttgctgtgcagtcaaggttactttttaaaatatgttttctttttcagcagtaaagctcaaataaatgttttcttctagagtgtccatgatttctttttcttttaattattttattttaccaaactttaattattttctttggcaaacaaaatagaattaatcaaaggctgtttattcaaaacttactgttataagggagtcagctgccatcattttcattatagtagaggttggaaggggtttgaaaggagagtaagtttttttgtcttattgtttgtttgtttgttttgagatggagtctcactcttgcccaggctggagtgcagtagcacgatctcagctcactgcaagctccgcttcccaggttgaagcgattctcctgcctcagcctcctgagcagctgggactacaggcacctgccactactcccagctaatttttgtatttttagtaaagacggggttttaccatgtttgccaggctggtctcgaactcctgacctcaggtgatccacccgccttagcttcccaaagtgctgggattataggcgtgagccactgcgccagcctagaagagtaagttttacagactaaaaggaggaagacttaagccaatctttggtgagtgttctttcatggtgacatattctagttccaatcgggtaaaagatacttggaagggaaggagtctttctggttggctttaaagtgtatgtagtagtctttgattgcttcacaatctattggtacataaggtgggggctttccaggctgcatgacaactgaaagacaatctggttctcagctttggagtcttgcataagcaattccttcttcaagagggaattaaagggaaatctagctatatatatatatatatatatatatatatatatatatatatatatattcttagttagtggactcaacaccctcctttttaatgtatatttatctttttggttctattttttaaatgactttttcatatacccatttttcaaatgcattgggatctctttcaggattctctactctgttcattatatgtgttaatccctcaccaagaatatgtatgttcttggcaaatgaaaggaacatcatgcaaagctatcagataatttgggatagctttacaaagctatctgaacgtttatccattaataaagcttgatactagagtaaatatataattaggggattctgttttgtaggactttccactctcatattgacatagagcctggcacacaggaggactccatatatgttggctgaacacagtcagtcagtcctcacttaatgtcatcaataggttcttggaaacttggacttcaagcaaaattatgtaagcaggtcctcaaataacgttactcagttacaacattgatgagaaatttcaaaattgatttcattatacatgatttcacttaaaattgcagtttccaagaacctgctgataacattaagtgaggacttactgtacagaaatactagtgtggtaatgggaactctggactaggagttggaagacctggcttctagcccctgctctgttgcaggctggtgggacaactatgatacacattaacagacttgtagctgtcagaaataatgtagaaatggcctccccattagggaccacaattcctacccctccttgaagggaggagtgaccacatgattaagttttcactaatggaatgtgagagaaagtgatgtgtgccacttgcaggttgagtcttaaaatattgcacatgtaatcctcagtccccttcccctatctgtgaccacagatacgactgtaagtcagttttgaccatgcagataaagacattgttctagggcatgatggaaaacccagatagaagaatcttggggaccttgaataactgtgtggagcaagcggtcttcctactgaattcaaagagtctgggaaatgatggggttagcaaaagtatgcagatttccttcctatagaatttctttgagcctggataaattttttttttcctatagaacaacttgagggagaaaactgctgatctcttgtattctcttgcttgttctgaaaaactctggaaatgctgatttggatgatttctacttcctttaaatattgcatactgcacagctagtgtttagtttgtattcacaacaccaccaaatgtgcagaatcaaaggtgcctttaatcccaccattccatccaaagcatgttacctgagtccctttgggggacaatagcaaaattataacactatagaggacatgaagaatttttccaaaagttttaggagactataatctcattgttctgtattctttctcatctaaacaagtgaaaagatgaccaaagttttacccacagaagagtcattcgtttattttcttactttcaagggactttaagaatgtaccacaacaacaatccatttcacaactatttcctgagcagctacagtgaacaaggacctgaagaagaagacacaatatccactggactggaatggaaagacagactagacagagtagatatgctccacagcacctgggacagcaccccagaaacatccagcaatgactggtattggaatggctcctctggtcacccacctgccatgtaagatttgcagagggttcctcctgtgaagcgtgggaggtttgggcacttcgcaacctgccagcaccatccagtatggacattttcatagatccagaaaagggctgaggtccaaaagattgagagtgcttcgggctgtgtttccatagtgagtggctggctattcagtggtcaaatgcgtttgagaggaaccaagtgatgtgcttcccaaggcaagtgtccagaacccaggagactcctctgttcagcaatggcatgaaacatctgaggttcttacatattctcgcacagaaatggattcccatagagaaacggatatattgttataggataatcagagatgctgttgtagcccatttgagctgctataagaaaataccatgaactgggtggcttataaacaacagaaactggccggacgcactggctcatgcctgtaattccagcactttgggaggccgagacgggtggactacttgaggtcaggagttcaagaccagcctggccaacatggtgaaaccccctctctactaaaaatacaaaaattagcctggcgtggcggcgcgcacctgtaatcccagctaattgggaaactgaggcatgagaatcacttgaacccaggagtcagaggttgtagtgagccgagatcacaccactgcactccagcctgggcaatagagcgagactcagtctcagaaaaacaacaacaacaacagaaacttattgcttacagttctggaggctgggaagtccaagatcaagacaccagtagcgaaggccttctttccggtccataggtggtgcttcctcactgtgcccttacacagtggaaggggcaaggaagtctctcctcctttataaggataataatcccattcatgaaggctctgccctcatgacccgatcgcctccctatgtccccaccttctaacaccatcatcaccctgggggttaggatttcaacaagtgaatttggcggggacataaacatttagaccatagcagaggctaaagcagagaagtctgctgaagaactttttaatgcattgtaatgcgttcagtgtgttaagttagtcacatacacacacacacacagacacacacaccccaagacggaatgcataggtgtgtattattaaaagtgtgaaaatacaccaccgcagattgtgtaggaccatttttttttttggacctggtagacatgtccattgctgttagtgcagcaaagggctctgtgtgcttttaaaaattccagtctgttaca

SEQ ID NO: 1023 - DNA, 35433 bp, Mus musculus
tctcgcgtgctgggattaaagacgtgcactacaatgcttgggtagacgtatttttaatttttatggtaagtattccaattccctccaagtgattatttaactcggatttatacacttcaaaatatgtacaggtttaggtttggttcacaaaataaaacttggtaaaagatgtggatccagtttaggaacgtaggtcaatcccaaggtttccccgctcagttcatttaacactcagaagtgagagatgaggaaagcagtgggaacggcggtggcattggtggcaccaataaacagtgagtgaaatcctacacacctccagcttcaagctcaactctgtctttttgggtaagcgattttaaaacattgtattttaaatgacctttcctcctcctctacctcaccatgctcttttctccctcctctcttcctcctccctctctccctctttcccccatccctactttttctccccctcctttgcatgtgggatatttaataaagacttcatacaaaccaggtatgtacctgctcattcgcctgacaacaggaaggtgaaagtatgttgtctccctagaaagatcaagtaagtatggtgctgtgttcaaaggaagtttcacctgggttagtgtgccggctcaggcgtcaatgtcctccaatgataaagccttggcctgtgaagctgtagacagacaaggactgagaaggtgtggggcttctttttagacatggtctgtctatgcatttgaagatggacttaaatttgctgttttgcccaggttagtgttgtaaccaccatcctcctgcctctgactctatgccacaacgagaaagatctttaaggcagctccagctagctcagtatgcctcatttatatacccgaaaagggccctgtgtttatatgcgcgaccttttctttctcacaagataaaagaaggaaccaacccccaaccaaaaacgaacaaacaaacaaacaacaacaacaacaacaaaacaaaaaaccaacctcctcccctgcaaaaacaagcaagcaagcaaacataatttaaccagtttaaacttgggaagacttgcaaatcttctctattgtggcttcagtctgccacctagtggtcaagaagagaaaaatcagaccagagcaaaattaatttgtcattgtcatttaccaagtgcttttccattagtgtggttaaacctttaccaaggctacatatgagttgactacctgatgtatctgaggaaaatatcaattcaacattctaaaccctagactcccaaatcaagttttccaaaatacttgtaccttggtgctacaaagcataaagtttgtagagtgagaggctctcaagatttcatgcccggaactctcctgctgcgtcctctcctcgctcctccggctccccctccccctacaagggaagggtttgtttcacttctgagtttgaaggcgtcgtccatcaccgtgggaaggtcatggtggcccgagtgtgaggcagctggtcagattgcatccacagtcaggaaaagggaacagagaggggacaatctagtgttgctcttcccttgaactcctcacatttatatcagcacctagaccagaaatagcctgaaggccttgagggtcatgtcttcccccaatatgctgagcaaaatcataaataaaaactgttccacttaaaatcacaaatcccaaaacagaaaaatcacaaatccttgctgggtgacagtggtccactcctttaatcccagcactccaaaggcagcctggtttacacagtgagcgccaggacagccaggactgcacagagaaaccttgtttccaaaaccccaaaaccccaaaccaaaccaaaccaactccccacaaaaactgctaaaatattggtgtacaagatgaatatcttaagggttatatgtttgtgaccatgttttgacttctaaggccatttccttcatgtctgtgcttcccaggatggagacattggcagttaaatctgccccagatggtagaagcagcgcactccctgcatatctagtgatgctcagaggatggctgctgctctcactctgttaacagattggcaggtgctgctcacctcccccaccttttgtgaggtgactgtcacaaatactgttgtccccaccatagggataaggaccgtcttctgaccttctggaaatgtctcaactgtgctcgttcctgcatggtgaatttcactgattggctgctgtactgcagctgtactctggtgagtcagcttcctttcttgcaaaataaaatcgttttcatggaggagtgttgtatgtgtggtggctctgtggtccctggcagcatctgggatcctgagctactgaccctgggggtatggtccattcagttcatacagggagtaatccaggatttctcatccacccctccacatctccctcacagtggaaagactgtcacctccaccccatccacaatgcccactgctgtcagggaactccagggcctgagtggcctaaagagaaacttcctggtgtctccagtagccacagctggaggacagaggtgaggcctgagccagatgctctcacccttactacattccaggataggactccaaccaggctgctcagtgctacagactctgtccagctgccctcacagcctcccacatctgggggcacttcccagaggcattgagtgctgtgccctatgttgctccacccttcactgcacccccacctgttctgagcaagccctcacctcagaatggtgtgtgggtcctctaagcagcagtgagaatcttccacagcctcttgcctgctgggtgaggtgactgtgcctctggtcccaagcccaggccctttttgctcagtgcccaccctccagtcgttcacttgttcagctgtacccactcatcggggctccccgagccctggaacatccctgaacagaggcctcccttgggtctccactttagaggtccttactcggctgacttcagtcctgcgatgccctttctggagtacttttcattaaatagcctattttatttctgagtatgtgtttatgcaagagcatttgggcagagagctggaagagggcattggatcccgggaagctggacttagagacagttggatgcctctcttgtgggctctgggaactgaacttgagtcctctgcatgcacagagccctctcttaaccactgagccatctctgcagccatccagttgttgggatcttttgtgcacatgcttgccctgctaatctgcctccctagcagtgggggtgggagtcgaaagcagggatcttgtagaatccagctacaggatgtagccaaggatctttccatctcagcttctccacctaaaaacagggctagaagtttggggcactgggaagatgacatttgggtgagcacctgatatctcaccaggaacaaggctagcagttgttcagtattagctggtgtgtaaccacaggcttttccacccacgccccagtttccaaataaccaaccagaggctttttatttgataacaaatgcctatgccataagctttggtctgttctctgactagcatctaacttacataaccctttaaactattctatgtcttccacatggttaggcacctctcctcagcttcatgttcctagagtcgaggcaaatctcctgcctctgacatcctgaacagagccctggctttggctttccactttagagaaacacagtctccaagagttccagtgtctttgccacatcttccaccctctaacgctgcctcagtttactggacatcagcttttaactgacagctgatgctcccacacagcacagaagagtgtctctccagatgggtgctaatcctgacacagtcccagggctatcatagatactaggtacctgtgcactagaaagtaaccaagagattaattaatcaaatcattggcatgagaggctggatgttcttaattgctcctatgacttcccaagtggaagagctgcaacacgtgatagaagacaaggaagaggtgagccaggaactttagtgagaagggacagggaagagggtggggaggacggacagaggccaagcccaagggcagtggtggatttcttggaggaatggggaggtgggactatgaaaactgtgttaaaaagcctccccacccacagcactttagagctggaaaggttgcctggactccacagaattctcccacccctaagcccaggtgacagtagatggcctgggggaacaggagtcctgaggcagcactgacagccatacctgctcctggcagggaccaatgcacaggggcccacatcctccatctggctcctcaaggctgcttcagcagggagctgttcccatgaagattcctggaggtgtggcagaagcagaaactctggaaaggagaagagcacccagtgtaacttcctcttccctcccccataccctccctcattgccattcaccagctgcccccctctcctcagccccttcccctgtctccaggattctctcccattaacacctggcctggccaggaagctgagttttgcatgggaccctgcactttcttgtcagtgctgggttttgatcacaaccaggggctcctgcttgggactccagtgacaaaagggcagcatcacccagtggccttctctgctctgagagaagacccttgctgctctgagatgagacccttgtccccgcttgccccacccccacccagctggacaacagttgtgaaacttgtggcagagactcaagtcccttgtataaagtagtatttgtgtatcctgtatatgttttccatgtgctccacctgacattgcatgtaaacctaacacaatgtaaatgggagtagttgtcagatgatgctgttagagaattataacaagacaagcgtatacatgttcagatgcaatttaaacatttatttgttttgtgcatgtgagtgcacgtgtgtgtgagagagtatgaacatgccatggcatgtatgtagaggtcagaggccaagcagtgtcagttctctaccaattccaatctcacaggatccaatctagcttggacattcaacaggtcaggaaaatattcagagtcctttgctatgttaacatggacatgccaagtcaaaaatgtagcccacatgatcaatgatggtgtgtcgtcacagatttcatactctattctcctgctgtctgtctcaatgtgtgggtgtgtctgtgagtctatgtgtgagatggggtgggaacaaccccctggtacactgtctttcttcatcatgtgctttggcttttcttaggctctgaatgttatcatagctccaaagttcatagctggaactctaacatgtaaggtggggttttaggatggggacagtgcccatgtagatggccaagtctcctttgggtcttccattatgtgagacacagcaataagttgccaattgcagtggagaaagcagtccctcaccagatacaaagacctttgactttccagtcctcaggatgctaatgtaattttgtgttttgtaagctactcagtttgtagtattttgttacagtggcctgatttgtgtaagatggcctacctacgtatcttgttggtcataatctatacattttatgtgaaactttcagagcttttgctaagagaaaaatctccagaattctaagtacttgcttcaggaaatactgcacggatcttttcgtttgaccaccaagtagtctgttgttcactacagagacacaatacagaatattctagacacgagcctttccttgagtccgtgagagtgtccatgattgataatgctttcagaggacacagtgcttgacctgacaagtggacagagtctctgatgaccacatgtcacaggtgtgtgacagaggagcctccccagcactggccatggctagatgtccccaggtgcttcaccaagtgctctggtccattagacactgtgcctgcctcttcagggtcttgagcatgatagctattcagacaacagttgtctgctgaactgctgttgtggtacattgctaaagcagtttgcgaggcctggagagatggctcagtggttaagagcactgactgctcttccaaaggttctgagttcaaatcccagcaaccacatgaaggctcacaaccatctgtaatgagatctgatgccctcttctggagtgtgtctgaagacagctacagtgtatttacatataataaataaatacatttttttttaaagcagtttgtaagtaagatgacaagatgattgtgagtaaaactattgccatttctccatttgttaaggcaaaaaataggatgaaagtctcttaaaacgtttgggagaattgttctgtcgggtgatatccactggagaagactgctcagacatgggttcaaggcaataggaagctgtccggtgaccagctttgctgggtgtttctgacctagttcaatgctgagcctttttcagggtgagttttcaagcagaaaaccatatcctgggctaacacccctctgttactaagaacagttagccagaagcagaactaaaggagccaaaaagcaaggttagcgcatctaggggctttcccagaactatgaactttgatagaaggcaagagctcaagcgttgagtctaccagaacccttctaccttaaaaaggtccctatttttttaaaaaaatttttattaggtattttcctcatttacatttccaatgctatcccaaaagtccccccatacccacccccccactcccctacccacccactccccctttttggccctggcattcccctgtactggggcatataaagtttgcaagtccaaagggcctctctttccagtgatagccgactaggccatcttttgatacatatgcagctagagtcaagagctccgggttactggttagttcatattgttgttccacctatagggttgcagatccctttagctccttgggtactttctctagctcctccattgggggccctgtgatccatccaatagctaactgtgagcatccacttctgtgtttgccaggcaccggcatagtctcacaagagagagctatatctgggtcctttcagcaaaatcttgctagtgtatgcaatggtgtcagcgtttggaagctgattatgggatggatccctggatatggcaatcactagatggtctatccttttgtcacagctccaaattttgtctctgtaactccttccatgggtgttttgttcccatttctaagaaggggcaaagtgtccacactttggtctttgttcttcttgagtttcatgcgtttagcaaattgtatcttatatcttgggtattctaaatgtctgggctaatatccacttatcagtgagtacatattgtgtgagttcctttgtgattgggttacctcactcaggatgatgccctccaggtctatccatttgcctaggaatttcataaattcattctttttaatagctgagtagtactccattgtgtaaatgtaccacatttctgtatccattcctctgttgaggggcatctgggttctttccagcttctggctattataaataaggctgctatgaacatagtggagcatgtgtccttcttactggttgggacatcttctggatatatgcccaggagaggtattgtgggatcctccggtagtactatgtccaattttctgaggaaccgccagactgatttccagagtggttgtacaagcttgcaatcccaccaacaatggaggagtattcctctttctccacatcctcgccagcatctgctgtcacctgaatttttgatcttagccattctgactggtgtgaggtggaatctcagggttgttttgatttgcatttccctgaaggtccctactatttatctaacattttgaatgcaacattctttcctttgtacatagtcatatgccatgtgcattagtaatctgctataatacagacccaacgatgagacgactcagacaaaagagtgtatttgtatctcttgtgacatctaggatataggggaagaaacactccacacagttatgcagggctctctgttttgttttgtttttaaagatttattttatttcatttattttatgtatataaaatacatgaaatgagtacactgtagctatactgatggttgtgagccatcatgtggtttctgggaattagaattcagggcctctgcttgctctagttggctccagttgctccagtctaaagatttatttattattagatctaagtacattgtagctgtcttcaaacacaccagaagagggcataggatcccattacagatggttgtgagccaccatgtggttgctgggatttgaactcaggacctctggaagagcagtcagtgctcttaactgctgagccatctctccagcccttagcctgctctcttatatcatctatgagcacctgtctatggtaacagcaccacaatgggctggaccttacctcctcaatcatcaagcaagaaaacgtcccataggcttgcccacagggcagtctggtgggagcatttccccaactgatgttctctccccaaatgacttatctgatacactggccttcggagaaaagcaagtcaacacctcattgtgatcccattttacccagtcagaatgtcataagaaaacaaataacattttcataagaaaataaacaacaatacattctgtcaaggatgtagacagatgggatgcacttgattcactgctggtgggaatgataactagtccaatctcagtggaagtcagtctggagtgttctcagaaaatgaaaaaatagctgggcagtggtggcagatgcctttaatcccagcacttgggaggcagaggcaggtggatttctgagtttgaggccagccttgtctacagagtgagttccaggacagccaaggctacacagagaaaccctgtctcaaaaaaccaaaaaaaagccggacgtggtggcgcacgcctttaatcccagcactcgggaggcagaggcaggcggatttctgagttcgaggccagcctggtctacagagtgagtttcaggacagccagggctacacagagaaaccctgtctcgaaaaaccaaaaaaaaaaaaaaaaaaaaaaaaaggaagtgaagaatagctgtggataacacagcttttcttttctttatatttcaggcatcagggatagaggtcaggtgtcaatgtaaatcactctaccactgagttacacttctaaattaaagacatttttcctttcttgaatgcccaaaaatttggagtactgcaggacaggctcactcttctgcagttagtgttatgtctcaaaatttgatttgaggtttagttgtttcagtaaattgtctttttaaagtcatgactaaacaataatatacagtgaaatttaaccacattcaggaaacactgaggaaactcaggcctgtggggaaatctggccttttgtttaagtatctcacttcgcatgtaggcgagaattgagatgtgaacatgagctcctgaaggaaaggaccacgtttctgtggctgcttcactctgggcagtaacacatctgtccaggtaaacccagccttgctgaacgtcaatctcagcacttgggaggcagaggtgagagtttgaggccagtctgatctatagagcaagttccaggatagcttgggctacactgaaaaaacactgtcttgaaaaacaaaacaaaacaaaacaaaacaaaacaaaacaaaacaaaacaccaaaaaccaaaaaagaaaaaaaaaaacaggaaaagaaaagaaaaaaatcaaaataaaacaaagccaaaaacaaagcaaaaaaaaaaaccacccagcaaaaaaccaaaccgcctagcctcaagacatgtgtggttgaatgtttttcacttctagtcgctaagcaagtgtgtgtttttacacaatgccctctgtggtgagtggcggattcccctgagagttcaccaaatgataggctttcacaatgctcccgggtgtctaccagacccagcaaagtattgatgtggttttggggtgaaagtcactctgtcttgtgcaatagttagaatctgctgaaaccagcagtgttcctatatgggacaggggtccagagctaacccggaggctataactgagcagaggtgaagaccacgaggcattggggagcgtatgccctttgtggtcagagagatctagcttcgtgccttgggtctgtgtctctccctcttactggcttctggcttcttcattaagtgggagacaaccacaggtatctgtatgggaagactcgactaccccttgactcaacattgcttgttacttactttgtacaagatactacttagtctaggggttatggagcataacctcaagtaggtaaagcccctgctccagcgtgtttgcattccagtaagaagcgaaagacagtaacacacatacaaaataagtaagaaaatgcaacaacagcaacaacaacaacacacacacacaaagtaagcaaaacgctaagggaaagatagagagtgatacagctttgagttgctgtagttcttctctctcctttgcttcatacagtttgcttgggaagtgtccagggccatggggtcacaactaacagcccttggaaatgagcttgtgtccttaatcttcatgacctaacgtgatttctctagaaacatcagtgcattaacaggaagacaagatggaagatcatattttggctctccttccttggtgggttgacactgctggtcctatccactagtaaaagcatgactcttaggctctgtgtggccagtggaaggtggcagttggaggaagcagatgcttggccagcctttgcctgggagcagtctagctctgagtgtcttattggagcagctgctggcatccagagttctttttggattcacgatttaattcaaaagctttgtgctcccgagaatcagctctggtctttcaaaaataagatgtgagtccgccgagaggctcccaaggtattgccttgccaactgcaagccttttaggagcagtttagtgagtggtgactgctagttgcagttggctgttagcccagagctaataatagatagaaaaggtatatacttaaggagtctggaaactgaggtttatctactcacagaaaatgagtttctaaaaaactagcttgaaacttacccagaaaaatcttagaacatggttctccaatgtcaaggtaagtgttctgtgacactgggcttgaattatgtagggaccacagattttagaatttggacccctgaacttgcttcacaccccaccaggaaccttcctgtacaacagccctcagaattcatctacatggtcttttctcagtatgggatccggtctagcaagtggagcacaccttctattgcttaaagatttgtttatgtatatgggtattttggctgcatgcatatttgcacaccaaaagaaggcagcggatcccatggaattactgtgggtgctgggaattgaactcaggacctctggaagaatagccagtgctcttaaccactgagccatgcctgcagtccatctattttttattctagtacagcccctcttcattcttactgaaatagtaatgcctgaaccacacagcttcacatttagttacaaagaaagagtgggagtatcatgtgacaattagtgttgttgactctccaggacaaacttatgggaaagggaggtctcctgacccctgaacaatcattttacttgaggataattttcattgcactcagaaacatgctgaattattgtccttacccttgccccatctcttgctctggtagagaatggccaaagcctggaaacaggatggcttgacagaagctctacttggcttcccagacccaagctggattaaaccaggttccctaaggagtcttaaggcagctgccaggagcaaggggcccactcattggctattggccttgactgggttggccaatggtaagctggggtctgcctgtccccatgagtaccagactaatgagacctggccactttctcctcatttctgtctgtacgattgtcagtggatctgacgacaccaaaaggtaagaacaattctatattctcggctggctgggtatgaatgcagaatcccacttgggctgtgttcagattttgctctctgcagcagtgtgaaggtagatgttgagaaaactcaggccttggaaacatggttggggcagataagctttggggcttttctttaactcttcaaagctctaagaaagaaacaataacctttcggtccacaagcttgagcctaaccggaagtttgccctgttcatttgatggcaggatgcccactgcaaaaagaacctggagatagtgaggtaggagggtcgatccacagatgagactctgttggaaagtgggatctgttgcttctcggctttaagagttacagtgacaggagaagcaggcagagagggcagcccgaggaagtccagttgaggtcagactgtaggatctgtctctatcacttagttctactgagcagatatgcacggagcatgcgctgtagaacactttgtcagggctgtgagtgaaaacatgggtgtgctcggaggagttggggacatctgtctgcatagagacattttaggggattgggtgacacaaagtggtgagaacctggaaaatagtggcaatctggacagaaagcctcattttgaaagatattttctgacagaggcactgcacctgctttgtcgttgttaaacctaattcttgctccatgaacacagcatcggaaccatggaggtagaggagatgaaggagggaggggtttggaagtcaaggcagcctcttgtgtgtcatgatacgtaagtccctcgtctgaagaaattttgtttttgagactgggtgtcactatatattcctgactggcttggaatttataaagaccaggccatcactgaactcacagggatccacctgcctccctggctcccaagtgcagggagcaagtgcatgctgagaatgggttctgaatcaagcctcacaagaggagccacctcactccccctgtgatgtcattcaaaaggatggcagagaatttgatcagagtcattctgtggacaagagggcaggtggagcaggccagaggggcgtgagagtgcatcttggttcttggagcagtttggttcccaaggcttagtgagaaatccttgatgcctctctccctgtgtttcgaggaatcttacaaggcacagggcttgcttctagccttgtgtgtgtgatcctgtgtgcatgtgtatgtggaagccagaggggtctctccatatgaggtgtctttcttaatctctgccttatttttttgagacaaggtctctcagaacctggagcgtgacgaagaaggccagactgaggtcattgatctctagggatattcttgtctctgtcatcccctaccccagtgtcagggttaaaggtgacagcttttgacatgaattctagggatctaaattcaggtcctcatgcatctgcagaaagcactaatcaacacagccatctcccaagcacttaaaattttatttgtgcaagtgcgtgcgtgcttgcgtgcatgcgtgtgtgtgtgtgtgtgtgtgtgtgtgtgtgtgtgtgtgtgtattagtgctttcttgagagagaatgtgcaagcacacacaagagtctaatgtgtgcagacacgctcattctatggcaggcacatggaggtgagagggtaacttttgggagtcgtccctttcctcctctcttgtttcttctgctcgtccacccaccgtcagcctcaggagactgtgatcgccaccgcatcttgctttttatgggagatccaggggttgaattcaggctgtcatccttgcccaggaagtgcgttctccttagccctcatttttgtcattttccaaggaggttacagagataaacattccagctgcttgtcaactcagaggaccggtagtccccatgtgctctgctaaagtcaggaggtgctatcttttggaaagcaaaggcttcaatcaggagctcgccctacaagcttcatggagggatgctctgctttgctggtttcttgagagtgtacaagtgtgtgcacacatatataccggacatgagaatgctaccgactttccaaaggctgagtgacaccttccagataatcttaggagctagacagaggtgcctgagctcctggcacagccatttatgattgggttgtgccattgtgaaattacaaatattaacttaatttttatctggttttgcttgtttattgtgtgcttctgaggtttgagcttagggcttcatacacattgggcaaatgcccctccactgagctctaccctcgggtaccacttcatgagtgaaggtgaaaacaaccaacaggccaggtgtccagcacacagagcgcttccatgaggatgtaggaaatgcactcagtctttctgtttctacaagcaaggatgggaggtcctggagttgcttttggctctggcatttctctgtgttttgttgtctttactggctgggggcgttgacctcttctctctctccttgtagcctaatctctgccagtcccagaggaaactccagtcttgaatttcacaagattctggatgttggtgctaaaatgccagcaggtcaaagaggaatttcacatccccttcactatacagtggtcctgaaacatgcagccatccctctgcataactcatgtgtggtttgctaggaaggccagtgggtcattggatgacatgttcattttttaaacattttgagacagggtttctctgtataacaaatagcagagctctctctatcgaccaggctggcctcaaagtcacatcgatcagcctgcctctgccttccaagtgctgggattaaaggtgtgcaccaccacgcctggtcctacctggttgcttcttattttggcagaaatgaccaaacctttccctctcccagatgtctcagctgtcggtcttccccttaaggctgtgtgagtgaagtgaaactcagcagctgtccacagtgggttgatacgttaatatttgtttactttccttctctcacaaacgtgtacggtattttgtaagtttgtaaactactccgcactttctgccaactgggtcttatgatattattgtgaaatcacatttctaggcaaagagcataaagccagggaggcaaataggggcagaatgaggagggggctggcaagctaggccattggattgacagtctctggtctctcaccctttccccatggggaagggtactaaaaggcagggtatgtgacggtagtatgtttctcttccccgtctgtgccagaggttatctagccaggactctacttccacgggttctgttggatctagattatcactcaagcacccagcagccccagttcctcacccctaagtcagagcagtcctaagtgacagccattgctcactggcttactccagacacccccctaggcatggttcatggagtctgtcgcttagtcttccaacaaacacataaagggcaaaactgattgtttgtacccgagcatgcatctttttgagtaacccccccccccagtattgtctccaaaacggctgtggttattcaatgagatggtggaacaaaggctttccaaatgcaaagcattatactggatccttgctgtctacctccaacacctatctacaatgtttcttttgtaacatgctctagctgtagattcatctcttgcacttggttccattcagtagtgtttccttatagaaacagaagtctttcaaagtcagagtgcaacatttgctttgtctacataaagaacagaaacaatgtggaatatttttttttttaaaaaagaggcattctgtgttgtccttcatgggtatccagacctgactttacatccagaactcggtgaaagagaagccttcagtgagatctgtccttatcagccaaaggcttaggggctggagagagagctcagcagctaacagtatctgcagaggaaatttcacaaagaacctggttcacaactgtctttaacttagttccaggggatccaatgccttctgccctccgtgggtacctgtacataggtgtatacccccatgaatattcaaataattaaaaaataaaaataaatctttaaaaagaacagctaagggtgtgcagcgcttagtacttcagtcccatggcactcggggaatcccagaacaaccatacctgtaagtagagaaaagcattaaggacatggaggcgtgggggaagaatgtgtttttagatgagaaagattattggtttttcagtagagagagagaactgaaaactctagagttctgtctcttccttcctccccagcattagggatctgttttgagctaccctttgtctttggggccctccttacctgcctccatttcaagcattttggtgtctttcttatttccccatggaaaagattggtgcttcttagattcttgagttgaagttttcaggaatatgattgctggagctgtaagaagggcagagttgacataagacacacaatattaaaagtctcagagcaatggcgggcaagatgactcagtgagtaaagatgctgaacctaatggcctgagttcattccccaggacacagttggtagaaggagagaactgacttccacaggtgttctctaacttctgtgggtacacacacacacacacacacacacacacacacaccacaccactacacaccacacaccacaccactacacaccacacacacacacacacacaccacaccatacacacacacacacacacacacacacacacacacacacacacacacacacacacacattaaccaaccaaccaaccaaccaaccaaccaatagactgactgactgactgactgactgactgactgtgataagaaagttccagggcaagctctgcttcattttctttgtagcagtttctgagactgggtttttgatcactccagattcagtagatggcgacagaggcactcagagacattatgagccaatctagggcagactcctgctctccaagagcaatgctagggcagttgtttctggctcactcctccccacacctgccagttccaatttgtgtacggtcaaactagaattgggtatttaaagaatgatgctccaaggcaacagggagtgcaaggctgaatttaatcaaaggcatttaaaatgatcttatgccacagtttatagcaccattaaaagaaagtcacaggtacagcaaagagtgatattatatagagagagtgaaaatacaaaccagggtaataccaaatccttccaagaataagagctgtttattgcttggaatcaaggaaaatgtcaacagaactaagcaaataaaggacagactccctgtacacctgggaatgaggacagacagacagaaggatgatctgcacctagagggcaagtcacagcagtgtgacgtaagaagacaaaatggtgacacacgctcacacaatcgcctgcagagatgttaataagggacgggatgtagctcggtggcagagcagttgcctcgaagagatgagtagagaggccctgggtttgagtctcagcactgtgggtgcagagaacaataacctccacataaaaccagccaaacgttacaggaactgggcccgctggtacacccacgtaatcccacatcagggaggccaacgcacgaggagtaccctgagggtgaggccaatttgggccatagacaaaggctctatattaaaaaagggtaaagcttaaaaagaaaagtctatgtagtggtgcttgttttgtaatcccaacacttgagaggtggcaatgaggccatcatgacttcaaggtcatcttaaatccagtgatggagtctttgaggcttgactgggttccatgaaactcattctcaaaatagtgctcccccaaaagaccccaaatcaaaacatatccaaggcacaacagtgcagaagaaacactttgtgaccccagtaaattaactgacaggaacttaacgaggatcttagaaatgactgaagaatgaagatcatttattttgctcactaaatttaacagttaaaacagatgttttcttttgcttttgttttggtttttggtttttgagacagaaaatccatatcactctgactgtcctggaagtcactatgcagaccaggctggtttcaaactcacaaagatacacttgcctctgcctcccaagtgctgggattaaaggcttgtgtcatcctgcttggctagtagtacactttttaaaactgagactacccaaagctggcaagagtaattcagctaggcctgcttatttttttctttgctgtgctgaggaaggaatccaggtccttgattatgcgagggcagtgccctgctacagagtgacaccctcagcccgagataggtctttgtgtgcatacactcatgttctcttgggtggcagcatcgtttcttgtaatgttggtatgtatgttaaatgactttaaagagaggctgagagagagacagctcagcagtttagagagcatgttactcttccagaggatctgagttcggttcccagcactgaaagtgggcagctcacaactgactggtgcttcactcctgtacacagatcacacacacacacacacacacacacacacacacacacacactcgaatgaaaataaaattaaatctttttaaaagacttaaaaacgtttaggtgggctggagaaacagctcacaattaagaccttgcacttgcttttccagaggactcaggtttgggtcctagtacccacatggtgcctcacaacgatccataactccagttccaggaaatcctcttcggggcctccttgggctcacacacacacacacacacacacacacacacacacacacacacacacacacacactttctctctctctctcttctcacaatcgcacacacagaatcattcacacacacataaattaaaaacaaaatgtcttttttttacaaaaaggttaatcagggcatagtggcatatgcctttaattcctccacttgggagacagaggcaagtggatctctgagttctaggtcagcctggactgcagagcaagttccagagcagtcaaggttacaacagagaaaccttgcctcaaaaacccaagaggacaaaaagtttagatttctgggcccaatcatttatatctgggaatatatcataatagaaagataagttttttagaaaagctgcctgcctgaaaacagctttgattgattgattctttttaaatcaatacatatcatttgttgcagattataaaatattttgaagtagacataagctaaaaaatagaaaccaagtttaaaagaactacagatattttggccgtatccactctatggactggcaatgcatatatttaaaatgatcataaaagctagaaaatgacaaggctgaaacacaggagaagatctttaggtgaaaagtgatttttgccattttaaagaataaacagattctttggaattagagttgcttttcccctgtagtctccaaagagtttctgtgtaggtgtgtgtgtgtgtgtgtgtgtgtgtgtatgtgtgtgtgtgtgttaatgcatgcacacaagtgctcacaagtgcgcacatgtgtatatgaaaacgagggagaaaaggcgagcttgggagtggggaggtggttagatttgagtggaacaagcagaggaacccaggaccggatcctgggatattctgcgtgtgtggtcctgcactcaggagggggagactggaatcaggccatccctgccacctgtggatttacaattctcaggctgaaaggagactgattgcaggagattttgctactcattgcagatttcagaggaggatgtctgagtgtgatggtttgtatatgcgtggtggcccaggaaatggcactattaggaggtgtggccttgttggagtagggttgtcgctgtgggtgtgggctttaagacccaagtcctacctgcttggaagccagtcttccactagcagcctttagaagaagatgtagaactctcagctcctcctgcaccataccttcctggatgctgccatgttcccatcttgatgataatggactgaacctctgaacctgtaagccagccccaattaaaaagtgtccttataagagttgccttggggattggagagatggcttagctcagagatggttaagaacactgactactcttacaaaggtcctgaattaaaatcccagcaaccacatggtggctcacaaccattcataatgagatctgacgtcctcttctggtgcatctgaagacactacagtgtacttacatataataaataaataaggacataaagtttaaaagaaaaaaaaaagagttgccttggtcgtggtgtctgttcacagcagtaaaaccccaactaagacactgatgaagacctcctgggagagtgagggctgggtagccactgaaggctctctgggagaggcgagtatgtagatgcagatctttggagtggattccacttagctatataggacatgatgcaggtcctgattggatgtgccatgtgagtctgcctttcccatgactattcacctgtcaatttcagggctcaggatgctactgttgcaagctctcctgttcctcttaatcctgcccagtcatgccgaagatgacgttactacaactgaagagctagctcctgctttggtccctccacccaagggaacttgtgcaggttggatggcaggcatcccaggacatcctggccacaatggcacaccaggccgtgatggcagagatggcactcctggagagaagggagagaaaggagatgcaggtatgtagaagagtcctgaatttggggggggggtctttgcagggtgagtccagtgattaattaaggcctagacacagacacaagaaagaggctaaaccttttttatttatttattgttttatggttcatactcatcttggagcttgcactgtcctccttgagtgggactagatggtacctgctgaggtatccatgacttcactccatctgcatctctttctctctgtctaccccttccatactaccaacataatcctatttttgttttctccgtaattcttgttctatctattggcaatcataagcgcttttcacgcatttctaaagcactcagtaccatgatttagtcaagaagaagagtgtaatgaattgccctaatgttgcttatattctaatgctaatttgggacccctcaagactgtgccccagaagtgagagagtctgcatgtaagactccgagtgaccctgctcccaagttatttctgattggtaaataaagatgccaatggtcaatagctgggcagaaacgacacaggtagagtttaggtttctcgtgcttgggttcagaggaggtgaagaagaagaatgtgaaggagcagcaaggaagtggccatggggtaagagttgagagcatggccctgaaggctgcccaactgaagccaagagcagctcagatgcaacatagtaataacttggggttatcaataggaaagttgataatagcacagagggtaggtatctgcccagctcttgtgctgtttaaagcttgttgtaaatatgaaggcagtaagtgtgtctctcatctgagaacttagtaatcaaaggtggggtagaaaccctgggctggaatttaaataatttttacaacagacaagactctgggtaatggttactaagagaagatgtcttccaacatgcaacatgctcatctgaatgtgtgcagatgctgaaggcatgggatacagatagggtgtactcagtgaggatgcagattaacaaataggctaatctgaggaggtagggcttgagccacgcctcaaaaggatggtttccagagggtagaggggggaggacatctggacacaggggatagaaggcaacacagtggttggtcagtgcacaaacagctggcagggtagggtgactatatggctacttacaggagattactttctggaaatctgctgtgctttggggcatatggaaaggcatgggatgaaggaatgaatagatgaatgaataagtggataaatcatattcagaacatctactgacccaactgacctctaacaaatctgagcttctaccagagcaaatcgttcacatgtcaaccagagaacaacgaacaaggatgtagtatctagctcgagagttctaaatatccatcatcagtctgctcattcatcttttaattcacccataaaggctttgaaaactaaggctggagatgaacttataggagcctgccaggccgtggagagtgaggaagcagagatgacggagatgatgtctttccttgtcctgtgaaatggattgtgggtagaggttccggagataatgcctcttgctggaaacagtctgggcagttctgttcccgccattcacagaattcttctcactttctaggtcttcttggtcctaagggtgagacaggagatgttggaatgacaggagctgaagggccacggggcttccccggaacccctggcaggaaaggagagcctggagaagccgcttatgtgtatcgctcagcgttcagtgtggggctggagacccgcgtcactgttcccaatgtacccattcgctttactaagatcttctacaaccaacagaatcattatgacggcagcactggcaagttctactgcaacattccgggactctactacttctcttaccacatcacggtgtacatgaaagatgtgaaggtgagcctcttcaagaaggacaaggccgttctcttcacctacgaccagtatcaggaaaagaatgtggaccaggcctctggctctgtgctcctccatctggaggtgggagaccaagtctggctccaggtgtatggggatggggaccacaatggactctatgcagataacgtcaacgactctacatttactggctttcttctctaccatgataccaactgactgcaactacccatagcccatacaccaggagaatcatggaacagtcgacacactttcagcttagtttgagagattgattttattgcttagtttgagagtcctgagtattatccacacgtgtactcacttgttcattaaacgactttataaaaaataatttgtgttcctagtccagaaaaaaaggcactccctggtctccacgactcttacatggtagcaataacagaatgaaaatcacatttggtatgggggcttcacaatattcgcatgactgtctggaagtagaccatgctatttttctgctcactgtacacaaatattgttcacataaaccctataatgtaaatatgaaatacagtgattactcttctcacaggctgagtgtatgaatgtctaaagacccataagtattaaagtggtagggataaattggagggcagggtacagtctgttctcattggatggcaccatttttcgaaagcacgtgttcatttagagtgttggcagagatctcattcccacctcatttgtgggtctcagtttacatccattaagacttctcccctgtagagctctctcagagatggtggtcctatgtctaggtcctattctgatattcattggctccctcttcacttcgcacattttcctttccttgcctttgctcacaatcttccttccagctcaggaaatcctacctaccttcacatggaggtggttccctgtccttcaaggccacttgggtaggtgatgttctgatgtgaccttgcagggttgtgggtgtaggggaagaggggagagggagagagcccgcgtccagccagagttcctgtgctctgggcaggcggatgtgggaggactgccggacactttccacacagccctgggtgggcatctggctgtgtgaagccactgaccccacacggttggggggtggacaaggggcagcccccggtaccaggttcttaatctctggcatcccactctgtatacaggagaggagctgagaacagaataggagctctagggcaacactctcagccccgaagatatgggaagagagcagagggagagatgttcccacacaggagagagttctaagtctggtccatggctggagcacaggaaggccttctattggaaggttagaagcagctcgttaggaaaaagcctatcccattgtccaagcacagcgggactagatgaacagagacagtctatggttttagagctttattgtagaaagccagggggaaagagagaaggtagaaagagagagagagaccagccatggccaagaggagagaatggggaaaaggagagagaggagaaaggctagagtaagaaagcttaaagagggagaggtaaaagcttagagagagagagagagagagagagagagagagagagtgtgagagagagagagagagggagagagagctaagcagcccctcctatagtaggcttgttatcttgctgttgctaggtaactgggaggagtctagcctgaaggtcagaagcttgggacattttgtatgtctagctagccaccagcctctccggtgggggactgtgggggcagtaacttcaacaggagccaggggtccaggagtcatgagaggacagcttccgtcccatgtactggggttccacctcttaactcaactagagaccaagctgtctgtgcatagcccattgccccacatgacctcacttcaactccctctttttaaaagctttattgtagaaagacagggggaaagagagaaggtagaaagagggagagagaccagccatggccaagaggagagaatggggaaaaggagagagaggagaaaggctagagtaagaaagcttaaagagggagagataaaagcttagagagtgagagagagagagagagagagagagagagagagagaagagagagagttttaaaatatccaaatgtggggctcagtggtgtggaggctctaggtttaatttaacttgctgtcttcatcagtgttttttccactgatgaaactctgtgtctgcgacgtgttccccttacattaggggctaaattgcctgttcaggctgagcttccttcccctctgaatcctccctgaagatctttgacaagtacttcaaaaacaggagtctcctgaaatccatttgtattcattgtttgcttcagtttctcttcaacactcattcttatctaacgaactattaggacatttagaaaccctgtggtttaagcacccaacccccatcctaatggtcagcttcacccttcccagagaggtgaaggatgactgtgctttctacagtgccagctctgtattatccctcaaaaaagtaatttcagtctaaaccacaaagcagggctgaactgacctcattctttcttcgagaactgacaagcagaaggagggtggatgatccagaattgattcttatttcccaagaattacagtagacaggctggggagaggaatttgtgtttaagagcatttgctggggctggagagatggctcagtagttaagagcactgactgctcttccagaggtcctgagttcaaattccagcaaccacatggtaactcagaaccatctgtaatcatctgtaacgagatctgatgccctcttctggtgtgtctgaagatagctacagtgtacttacatataataataaataaatctttaaaaaaaaaaaagagcacttgctgtctttagagaggacctgggttctgttgccagcacccacactggacagctcacagctacctgtaactttagttccagggaatctgatgctcctttctggtttctgtatgcacatggtgctcataaatatacccaaggcacacacacatacacataaaataaacaaatcttaaaataccataccatagaagctggttaaatacatttggcccaagaccttgatcagttgggagcctttgttttttgtttttgtttttgtttttggttttttgagacagggtttctctatatagccctggctgtcctggaactcactttgtagaccaggctggcctcaaactcagaaatccacctgcctctgcctcctgagttgctgggattaaaggcatgtgccaccacacccggctttgtttgtttgttgttgctggtttttttttttttttttttttttttttttttttttttttgcagtgggatcctttgaaggatcaccttgacacacactacctgactctcagtgtgtactaaggtgatgaggaggcctccctggcttccccatagtcctatggtttgttgttccttctgtgagcagtgggcatatgactgatgcaatgatggtacttggaattaaacctagagcctccacaccactgagccctacatttggatatttttaaactgaccttcaggggctggagagatggctcagtgttaagagtaccctttgctcttccagaagtcctgagttcaattcccagcaaccacatggtggctcacaaacatctgtaatgagatctgacaccctcttctggtgtgtctgaagacaacggcagtgtactcacatacataaaacaaaacaaaacaaaaccctgatcttgaaagccaagaggtgattggaaattgaaaggcaaaatgattcttgaaagtgaggggacttgagggaggggctgtttaagggggactgggggggggacggttgagatgcaaagtgaataaataaataatggataaaagcccaaaatgatgctttcaaatgatttagtttacatcctttaataaacgtcttttgtataaattatgaaatagagctacaagtgccccacagtgataaacgttccttcaggagagaactgcttaggggactctttaaaggcttagaaaccccgacatctatgcaaaggttgctgttttcaaatttcggttctggatgattcccagtggtaaagatagcggaggctttgtcttttaaagctcttgctggtcattactttctgcaaatgaagatccattccaacgttacagtaaaactacatgctgtgcgcgacttctgtttttgtttccagagaagcgtttgggagtgagagaggatttagctgtattgtaactatgttgcaagtagcagaatgcccaacctcagataaggtcgcaaaaaacccccaaaaccccacagaaatacctgggttctgacccaggcaggcatcttgtgtgctccttctcctcctccatccttgtcttgcctgagcctgtctgccttagtccctcctcctagctcgcggtcatcccgttcagctgccatgcttgcccagagccaggtattcctagttctgcctccaccatcgatcatggagcagaccccaggtcctccttaggacaactgcacagtttccttcctccacctgctggccactgcccaacccactgcactcatctggggttgcttggtgctgaacccagagctccaaacagagttccaggcctgggactagtgacagtttgaagcctaaaatccagagtggccagagactgtaaccaagcatcattctggcccacaacctgtcagtttggggcaagagcagctgaagagccaccagcccccccccccccccccaaagtaaggccagatagcggcagtaaaaaataccacaaatgtcgtaattccagatgctcacttaacagtgcaaaaccaaaaaaaaaaaaaaaaaaaagaacaatcaagacatcatgcttccccctgaggccagcagctctactgtgataaaccctgagaaaaccaatttagctgaaccacaagacaatggtttcaaaacagcaattaggagtatgttcaaggacttaaaaaggatatgaagggctggtgagatggctcagtgggtaagagcacccgactgctcttccaaaggtccagagttcaaatcccagcaaccacatggtggctcacaaccatccgtaacaagatctgactccctcttctggtgtgtctgaagacagctacagtgtacttacatataataataaataaataaatctaaaaaaaaaaggatatgaataaatccccgaatgaagaccgtgagcgcacaaccattgagtgaaatgagaaaaataattcaaaacaggaaagtagaatttagcagagaaatggtatccctaaagaaaaaccgtactgaaataaaagtcaaaatgaaaaactcagaggtaagcttcatcaacagattaaaagatgtggaagagaaaacttcaggttttagagataaagtaggagaaatagatcagtcagaaaaaaattaaatcatcatcatcaccatcaccaccatcaccatcatcaccaccatcaccatcatcaccaccatcaccatcaccaccatcaccatcaccaccatcatcatcatcatccaggcacaaaacacccaggaaatctggtacactatgaaaattaaaatacaacatatataaagctatgtgacacaatgaaaacaactctaagagacacgtttatagcacttagtgtcgacatcaaaaacatttggagacatacattattaataactaaatgacacacctgagagctctagaaaaacaagaagaaataattctccaaaaagagtagacaggaagaaagaagtaagcggagggtggaagtcaacaaacacagacaaaagctactaagaaccaaggaagaagctttggtttggctttgtttgagaaagcaacaagtttggcaaacttttagtctaactaacaaaaaataaaaataaaaaataaaaatagagaaaatccaaactgacaaagttagagctgaaaaggaagacattacaacaggtaacaaaaaacgacacagagtcctgaattctaccagacctctaaagaacgaataccaatactaaaattatcccacaaaatataaactgaagatcagctctaaattcttttgatgaagccattaccatggtaccaaaaccgcacagacttgacaagaaattatagtccaatatcccttatgaacagatgtaaaaattctcaataaaatatttgcaaactgaattctagaacacattaaaaaaaaatcaaccatgataaactggtttcgtgccagagatgcagggatggttcaatatatgtaaataaataaataaataaataaatacaatccattacataaaaggattgaaagagaaaaattcccatgatcatctcattagttgagagaaagaaagaaaggaaggaaggaaggaaggaaggaaggaaggaaggaaggaaggaaggcaggcaggcaggcaagccttagacaaaatctaatacttcttcattgtaaaaatcctggaaagattaggcataaaagggcaaagctcaacacaataaagagaatttacagcatgtccacagccaatatcatcctaaatggagagaaactgaagcatttgggggcaggtgacctggtaaacagcatgcctccacgatctctgcttcagttccttcccagactgccctcccctagcaactctgatcaagacgggctggcgagctgaaataagccctttcctcccctacttgcttttggatcatggtctttatcacagcaacaagaaaccaaactctgtccctccatcccttcgtcctaccccccccaccccccatcccccctctctctcctgaatattgggacgatttctcaggttcttagtggattagatgatgttttgtttctttacagggaggtctccttgtgtctcccaggttggccttcatctgccatggtggcttgggattttgtgttggaactagcacatttgggtattgtgaagcaagaccctggcttctcttaaaatcctcaagtaaatgtgcatatttgtgtgagcagagttaactggcttaggctcagattacacacagtgtctcatcctccatgggtgtggatcctttgtgaattcctgctttgagaccgggtagttactaccttctgtgttctgtgtttcctgcgtggcatttactctgggacttggtagctgagtctgcgaccttggatctattctgcatttgtgcagcctggaactaagtctaggaattatgtagggacctctacagagtgaaaagaacccgtttccagcaagcttcctggtcacttcctggcattcttcagctcccaggaccctccctttcctgattcttctgaggtctggtgctgttttgtgtaactatggttggtttggagtaaagttcttagagagacgacaaagaagccttaggttgtcttgaacggtttgaaagccatcaccctccctctgactctctctggtcccagggcaagctttctttgggagcggtggaagagtgcctgcagcatcaggagcttgcaggcaggaaagagtggcaagaaaggcagccgtttctattggcattcctggtgcagaggctacttttccgggcctgttggttcgcaaaggtgatttctggagcttgcttgatggtctggaatacgctgcttccgagtctgatctgcctttggcctaagtcgagaagctggaaaagacaaacacacccagaacgctcagctgggctatttcttcagcttccggcttcagtcctggctgcctacctgttcacttttcaggcgctttcggtgtttgctgtgaaaggtttatttctctacaatggttgggcagacacgcatgaagctctaccggtagctgagacattgctggcatcggatagctgatgggccattgggatccgttttcttcgaaggcgttgcccctgagagactaaccatgcttcagcagacgatccaacacgcaagcacatgttgcgtgacgcactaaggacgcactaagaggtcgcaatgggttttatttagtacagcataggaagttgggagacaaaaatgatggcgggtataggggaggagttagacggaatggactagggggttgatttgattgaaacaaagtatatgcacttatgaaatccttaaaggaaaacagatgactgtggttcagttcgtggtcagggtcatggctgtgatgtgtgagcacctgcaggaactgctagatgctgtcatatttccttcaacctcctgggggcagcctcctagaactgcttttccggtacccttaagatgccccatgatttccttctcctaaaagcctttgaacggcctcaagtggggacttgaagtacgccccgcgctggtttcaacgtgcacttccagctcctgttgagatttagttgccattgtgaaaagtagttaagaggcaaagccattaactggtgcctgttctaatgaaaggattaacacgtccaccctgggaggccagtctgcctttttctcttttgcctcgctgccatgtgatcgcttcagcaaggagggcttggccacacactgctgtcattttttttttttttaactttatttatttaatgtatgagtgctctgttgcatatacatccgcctgcctgaagagggcatcatattcccctatagatggttgtgagccaccatgtggttgctgggaattgaactcatgacctctggaagagcagccagtgctcttaactgctgagccatctctccagctctgttgtcttaatcttagatttccccactctccagaaatttgagctaataaaaaatgttttgaagcagtttgctcgagaacctacattggcctccacctggaggtctcctaagtctcccaagaatgggagttacagttgtgtgccattatgaattacgattttctatgccttttaaattacccagggtagaattctgctatagcctctccagacagactgggtcagccagattcttccatgagtgtggatcagaacacactatgcagacttaaagctcataggtggccatcttctactatgcagtataggaaaaagaagcttagctacagagaaataaatgaggggaggagagatgggggagagggaggataggggaggaggagggagggggagggaagagagggagggaagggagaggaaggataggggagttccccttgatttctgaaagctccccacgtttctcctcaagagtcctttgacacacagttcctagatttttacagttactcttttgagcttagactaagtttcttatttgcatccaatgacatagggccaggaactgttctgtgcctgtgcccagggatcagtctgaggtcttctgaggtctagtcatgcaaaaatatttgttaatggatcaacaaaggcactattattaggctgtcacaggataaaataaaaaactgccatttcccatttatttattagccttcaattaccatcttagaaacctctgtgaaactttccatttcatcactggcttacagaagccatgtattcatttagcaaatatttattcggcatctcatatgtacaagacatatgacaatgaaaaaatatcaataatattattgaagtacctaaaaggtattattttatttaatcctcatggcactttataaaacatcactgaccaagttgatctatctgaaagctgggtgtaagagaagctaacgtgttcaaagccacagctcttagacagcttaacaaggagcagacccagagcccatgtagacaagaggaagaatcccaatgaccgttttcctgctggctctgagacatttggggcacaggttgttcacaggaccttttgcttgaatgttcacggtcttgtggaaaaattcttgccttgggaagtgagtcactgagtttgtcttatgacagagagtctggctgttaacaggaaacatgaggaaatgtcttagccatcgttcaactggacaagttctgaggtcttaggttccttgtagtagaatacaaggacaatccagggagtgtcttgcagggggagcttgtttaaaccagctgaacgaggctgagtcaatgttaaggttactttactttaaaataaccaacaaaacgttttaaattatacagtgcataaaatgtaaaaataagaattaaaaataaaatacagcttccttaccacagagaaagtgaatctgaagtggagaggagtcagggtaaatgtggccccattaaagctgctgcatgggaagggtgacgctgatttacactggatttccaggttagccagggctgcggagccagcgagagatttgctgaaaagaaagaaagcaaagtacctgatgggtgggatagtgcgataaacagctagccttacctgggtacaaaaccacagccgacgaggggggttcactccagacctaagatcaagcagccaagttagaatagactgctctgaattagagtctacagtacgggaagcttacgaactccacttattacagttcttttcttagaagggcctgaccgaatgtgcaaacagttcagaaaagtcatttgcaatagggctggggatgtagctcagttagcaaagtgcttgcctaacacacaggaagtgctgggttcaagtcccagcactcataaactaaacaccagtgaactcggcacttgggaaatggagacaggagggaggaagttgaaggtcctcaaacacagaaagttcaaaatctgagccaacctgggctatatgagattctgtctccccccccccaaaaaaagtttgctatgtgtggtagtccacacctttactcccagcgttcaggaggcagaggatctctgtgagttctagaccagcatggtctacttagagagttccagtccagccaagggacaaagtgagagtgatcagagaagaaagtgtgtaagagactgtagaccagtgattcttgaccttcctaatgttttactgtatttcctcctcttgtgatgacccctaagcacagtgtcgtttttgttgctacttcataactgtaattttgatgaggttatgactcataccgtaaatatctgatgtgcacgatatctgattatcgacccccaaaggaaaagataggtatgactacaaaataaaaaatgtagctttattgcctttaaaagctggccaaacaagatttgcttaatgatgacactaactgacataccatgaggataagggaatgtcacagggccccagccctaggtgaggagctcctggcatcagtggctgctgagagaaggcaaacaagtcgtctccaggggcacgcttctgcctaggctagccagtcccagtggtcagccctaaacatgtgtgcacaagcaaaactctgtgaagtgttttcccccagtcctgctcctggaatgatgactctgagactaattatttattattaaatgcctaggccataaaccttggctcattccctggctaactcataatttatttatcccatccaaactattctatgtcttccatttggttaattgcctctccttcagtccctgacagcttctttctttgagtcactcagcgtctagctctgagtctctttattctatcctgcattcaggtaccctctagtttatgtcctttcttggtgctcttgaatctcttttttatatactcactatttcccagaatcttctgtcttcctgccaatgtcctgcctcctgcctcagttcatcagccataggcttttttattgacaggtgatacttagaagagattctcttacataacactaaatggtccagagtcatctctctgtccgtctgtctgtctatgtgcatgcatctctctttctatgtctctctctgtatgtgagagtgagacagagattaattatagaagacaaggttatgaacttgagaggggagcacatctgagcagttggaggtgggatagagggagtgcagagaatgtaaatatcctgagcacggatgaagctgtcaaaaataaaaagtacttagacactgtctcaaatgataagacatcccataaacctgaagttatttgcaataagtgtgacaagttcaagtccctgatgtatgaagaggccaaacacatgataataagccaaaacacatgtcaataagcccaaacacatgataataaaccccctttgtgggcaagggtagaaggaggcaagtcacacagaggagagagccactggagtgtgcgccgagatcatgcatttcttaataagtaaagattgaaacaacaaagacacacattttacctttaccgttttccactatgtaattaattagagtctaaagtagcaatatttaatgcaggcatggagcttgagtttggattctcaccaaggctatttttattagtttacaactttttgaaagtaaattagtctaagttttatcagagacatgaaaaatggccatacattttgtctaataattagattcttgcgactgcacaggaagagaataatcctaactgtaagaagattatcttggtatttagtagtataatttaggaggcagaagctggaaatgagctattctg

SEQ ID NO: 1024 - DNA, 35433 bp, Mus musculus
cagaatagctcatttccagcttctgcctcctaaattatactactaaataccaagataatcttcttacagttaggattattctcttcctgtgcagtcgcaagaatctaattattagacaaaatgtatggccatttttcatgtctctgataaaacttagactaatttactttcaaaaagttgtaaactaataaaaatagccttggtgagaatccaaactcaagctccatgcctgcattaaatattgctactttagactctaattaattacatagtggaaaacggtaaaggtaaaatgtgtgtctttgttgtttcaatctttacttattaagaaatgcatgatctcggcgcacactccagtggctctctcctctgtgtgacttgcctccttctacccttgcccacaaagggggtttattatcatgtgtttgggcttattgacatgtgttttggcttattatcatgtgtttggcctcttcatacatcagggacttgaacttgtcacacttattgcaaataacttcaggtttatgggatgtcttatcatttgagacagtgtctaagtactttttatttttgacagcttcatccgtgctcaggatatttacattctctgcactccctctatcccacctccaactgctcagatgtgctcccctctcaagttcataaccttgtcttctataattaatctctgtctcactctcacatacagagagagacatagaaagagagatgcatgcacatagacagacagacggacagagagatgactctggaccatttagtgttatgtaagagaatctcttctaagtatcacctgtcaataaaaaagcctatggctgatgaactgaggcaggaggcaggacattggcaggaagacagaagattctgggaaatagtgagtatataaaaaagagattcaagagcaccaagaaaggacataaactagagggtacctgaatgcaggatagaataaagagactcagagctagacgctgagtgactcaaagaaagaagctgtcagggactgaaggagaggcaattaaccaaatggaagacatagaatagtttggatgggataaataaattatgagttagccagggaatgagccaaggtttatggcctaggcatttaataataaataattagtctcagagtcatcattccaggagcaggactgggggaaaacacttcacagagttttgcttgtgcacacatgtttagggctgaccactgggactggctagcctaggcagaagcgtgcccctggagacgacttgtttgccttctctcagcagccactgatgccaggagctcctcacctagggctggggccctgtgacattcccttatcctcatggtatgtcagttagtgtcatcattaagcaaatcttgtttggccagcttttaaaggcaataaagctacattttttattttgtagtcatacctatcttttcctttgggggtcgataatcagatatcgtgcacatcagatatttacggtatgagtcataacctcatcaaaattacagttatgaagtagcaacaaaaacgacactgtgcttaggggtcatcacaagaggaggaaatacagtaaaacattaggaaggtcaagaatcactggtctacagtctcttacacactttcttctctgatcactctcactttgtcccttggctggactggaactctctaagtagaccatgctggtctagaactcacagagatcctctgcctcctgaacgctgggagtaaaggtgtggactaccacacatagcaaactttttttggggggggggagacagaatctcatatagcccaggttggctcagattttgaactttctgtgtttgaggaccttcaacttcctccctcctgtctccatttcccaagtgccgagttcactggtgtttagtttatgagtgctgggacttgaacccagcacttcctgtgtgttaggcaagcactttgctaactgagctacatccccagccctattgcaaatgacttttctgaactgtttgcacattcggtcaggcccttctaagaaaagaactgtaataagtggagttcgtaagcttcccgtactgtagactctaattcagagcagtctattctaacttggctgcttgatcttaggtctggagtgaacccccctcgtcggctgtggttttgtacccaggtaaggctagctgtttatcgcactatcccacccatcaggtactttgctttctttcttttcagcaaatctctcgctggctccgcagccctggctaacctggaaatccagtgtaaatcagcgtcacccttcccatgcagcagctttaatggggccacatttaccctgactcctctccacttcagattcactttctctgtggtaaggaagctgtattttatttttaattcttatttttacattttatgcactgtataatttaaaacgttttgttggttattttaaagtaaagtaaccttaacattgactcagcctcgttcagctggtttaaacaagctccccctgcaagacactccctggattgtccttgtattctactacaaggaacctaagacctcagaacttgtccagttgaacgatggctaagacatttcctcatgtttcctgttaacagccagactctctgtcataagacaaactcagtgactcacttcccaaggcaagaatttttccacaagaccgtgaacattcaagcaaaaggtcctgtgaacaacctgtgccccaaatgtctcagagccagcaggaaaacggtcattgggattcttcctcttgtctacatgggctctgggtctgctccttgttaagctgtctaagagctgtggctttgaacacgttagcttctcttacacccagctttcagatagatcaacttggtcagtgatgttttataaagtgccatgaggattaaataaaataataccttttaggtacttcaataatattattgatattttttcattgtcatatgtcttgtacatatgagatgccgaataaatatttgctaaatgaatacatggcttctgtaagccagtgatgaaatggaaagtttcacagaggtttctaagatggtaattgaaggctaataaataaatgggaaatggcagttttttattttatcctgtgacagcctaataatagtgcctttgttgatccattaacaaatatttttgcatgactagacctcagaagacctcagactgatccctgggcacaggcacagaacagttcctggccctatgtcattggatgcaaataagaaacttagtctaagctcaaaagagtaactgtaaaaatctaggaactgtgtgtcaaaggactcttgaggagaaacgtggggagctttcagaaatcaaggggaactcccctatccttcctctcccttccctccctctcttccctccccctccctcctcctcccctatcctccctctcccccatctctcctcccctcatttatttctctgtagctaagcttctttttcctatactgcatagtagaagatggccacctatgagctttaagtctgcatagtgtgttctgatccacactcatggaagaatctggctgacccagtctgtctggagaggctatagcagaattctaccctgggtaatttaaaaggcatagaaaatcgtaattcataatggcacacaactgtaactcccattcttgggagacttaggagacctccaggtggaggccaatgtaggttctcgagcaaactgcttcaaaacattttttattagctcaaatttctggagagtggggaaatctaagattaagacaacagagctggagagatggctcagcagttaagagcactggctgctcttccagaggtcatgagttcaattcccagcaaccacatggtggctcacaaccatctataggggaatatgatgccctcttcaggcaggcggatgtatatgcaacagagcactcatacattaaataaataaagttaaaaaaaaaaaaaatgacagcagtgtgtggccaagccctccttgctgaagcgatcacatggcagcgaggcaaaagagaaaaaggcagactggcctcccagggtggacgtgttaatcctttcattagaacaggcaccagttaatggctttgcctcttaactacttttcacaatggcaactaaatctcaacaggagctggaagtgcacgttgaaaccagcgcggggcgtacttcaagtccccacttgaggccgttcaaaggcttttaggagaaggaaatcatggggcatcttaagggtaccggaaaagcagttctaggaggctgcccccaggaggttgaaggaaatatgacagcatctagcagttcctgcaggtgctcacacatcacagccatgaccctgaccacgaactgaaccacagtcatctgttttcctttaaggatttcataagtgcatatactttgtttcaatcaaatcaaccccctagtccattccgtctaactcctcccctatacccgccatcatttttgtctcccaacttcctatgctgtactaaataaaacccattgcgacctcttagtgcgtccttagtgcgtcacgcaacatgtgcttgcgtgttggatcgtctgctgaagcatggttagtctctcaggggcaacgccttcgaagaaaacggatcccaatggcccatcagctatccgatgccagcaatgtctcagctaccggtagagcttcatgcgtgtctgcccaaccattgtagagaaataaacctttcacagcaaacaccgaaagcgcctgaaaagtgaacaggtaggcagccaggactgaagccggaagctgaagaaatagcccagctgagcgttctgggtgtgtttgtcttttccagcttctcgacttaggccaaaggcagatcagactcggaagcagcgtattccagaccatcaagcaagctccagaaatcacctttgcgaaccaacaggcccggaaaagtagcctctgcaccaggaatgccaatagaaacggctgcctttcttgccactctttcctgcctgcaagctcctgatgctgcaggcactcttccaccgctcccaaagaaagcttgccctgggaccagagagagtcagagggagggtgatggctttcaaaccgttcaagacaacctaaggcttctttgtcgtctctctaagaactttactccaaaccaaccatagttacacaaaacagcaccagacctcagaagaatcaggaaagggagggtcctgggagctgaagaatgccaggaagtgaccaggaagcttgctggaaacgggttcttttcactctgtagaggtccctacataattcctagacttagttccaggctgcacaaatgcagaatagatccaaggtcgcagactcagctaccaagtcccagagtaaatgccacgcaggaaacacagaacacagaaggtagtaactacccggtctcaaagcaggaattcacaaaggatccacacccatggaggatgagacactgtgtgtaatctgagcctaagccagttaactctgctcacacaaatatgcacatttacttgaggattttaagagaagccagggtcttgcttcacaatacccaaatgtgctagttccaacacaaaatcccaagccaccatggcagatgaaggccaacctgggagacacaaggagacctccctgtaaagaaacaaaacatcatctaatccactaagaacctgagaaatcgtcccaatattcaggagagagaggggggatggggggtggggggggtaggacgaagggatggagggacagagtttggtttcttgttgctgtgataaagaccatgatccaaaagcaagtaggggaggaaagggcttatttcagctcgccagcccgtcttgatcagagttgctaggggagggcagtctgggaaggaactgaagcagagatcgtggaggcatgctgtttaccaggtcacctgcccccaaatgcttcagtttctctccatttaggatgatattggctgtggacatgctgtaaattctctttattgtgttgagctttgcccttttatgcctaatctttccaggatttttacaatgaagaagtattagattttgtctaaggcttgcctgcctgcctgccttccttccttccttccttccttccttccttccttccttccttcctttctttctttctctcaactaatgagatgatcatgggaatttttctctttcaatccttttatgtaatggattgtatttatttatttatttatttatttacatatattgaaccatccctgcatctctggcacgaaaccagtttatcatggttgatttttttttaatgtgttctagaattcagtttgcaaatattttattgagaatttttacatctgttcataagggatattggactataatttcttgtcaagtctgtgcggttttggtaccatggtaatggcttcatcaaaagaatttagagctgatcttcagtttatattttgtgggataattttagtattggtattcgttctttagaggtctggtagaattcaggactctgtgtcgttttttgttacctgttgtaatgtcttccttttcagctctaactttgtcagtttggattttctctatttttattttttatttttattttttgttagttagactaaaagtttgccaaacttgttgctttctcaaacaaagccaaaccaaagcttcttccttggttcttagtagcttttgtctgtgtttgttgacttccaccctccgcttacttctttcttcctgtctactctttttggagaattatttcttcttgtttttctagagctctcaggtgtgtcatttagttattaataatgtatgtctccaaatgtttttgatgtcgacactaagtgctataaacgtgtctcttagagttgttttcattgtgtcacatagctttatatatgttgtattttaattttcatagtgtaccagatttcctgggtgttttgtgcctggatgatgatgatgatggtggtgatggtgatggtggtgatggtgatggtggtgatgatggtgatggtggtgatgatggtgatggtggtgatggtgatgatgatgatttaatttttttctgactgatctatttctcctactttatctctaaaacctgaagttttctcttccacatcttttaatctgttgatgaagcttacctctgagtttttcattttgacttttatttcagtacggtttttctttagggataccatttctctgctaaattctactttcctgttttgaattatttttctcatttcactcaatggttgtgcgctcacggtcttcattcggggatttattcatatccttttttttttagatttatttatttattattatatgtaagtacactgtagctgtcttcagacacaccagaagagggagtcagatcttgttacggatggttgtgagccaccatgtggttgctgggatttgaactctggacctttggaagagcagtcgggtgctcttacccactgagccatctcaccagcccttcatatcctttttaagtccttgaacatactcctaattgctgttttgaaaccattgtcttgtggttcagctaaattggttttctcagggtttatcacagtagagctgctggcctcagggggaagcatgatgtcttgattgttcttttttttttttttttttttggttttgcactgttaagtgagcatctggaattacgacatttgtggtattttttactgccgctatctggccttactttgggggggggggggggggctggtggctcttcagctgctcttgccccaaactgacaggttgtgggccagaatgatgcttggttacagtctctggccactctggattttaggcttcaaactgtcactagtcccaggcctggaactctgtttggagctctgggttcagcaccaagcaaccccagatgagtgcagtgggttgggcagtggccagcaggtggaggaaggaaactgtgcagttgtcctaaggaggacctggggtctgctccatgatcgatggtggaggcagaactaggaatacctggctctgggcaagcatggcagctgaacgggatgaccgcgagctaggaggagggactaaggcagacaggctcaggcaagacaaggatggaggaggagaaggagcacacaagatgcctgcctgggtcagaacccaggtatttctgtggggttttgggggttttttgcgaccttatctgaggttgggcattctgctacttgcaacatagttacaatacagctaaatcctctctcactcccaaacgcttctctggaaacaaaaacagaagtcgcgcacagcatgtagttttactgtaacgttggaatggatcttcatttgcagaaagtaatgaccagcaagagctttaaaagacaaagcctccgctatctttaccactgggaatcatccagaaccgaaatttgaaaacagcaacctttgcatagatgtcggggtttctaagcctttaaagagtcccctaagcagttctctcctgaaggaacgtttatcactgtggggcacttgtagctctatttcataatttatacaaaagacgtttattaaaggatgtaaactaaatcatttgaaagcatcattttgggcttttatccattatttatttattcactttgcatctcaaccgtcccccccccagtcccccttaaacagcccctccctcaagtcccctcactttcaagaatcattttgcctttcaatttccaatcacctcttggctttcaagatcagggttttgttttgttttgttttatgtatgtgagtacactgccgttgtcttcagacacaccagaagagggtgtcagatctcattacagatgtttgtgagccaccatgtggttgctgggaattgaactcaggacttctggaagagcaaagggtactcttaacactgagccatctctccagcccctgaaggtcagtttaaaaatatccaaatgtagggctcagtggtgtggaggctctaggtttaattccaagtaccatcattgcatcagtcatatgcccactgctcacagaaggaacaacaaaccataggactatggggaagccagggaggcctcctcatcaccttagtacacactgagagtcaggtagtgtgtgtcaaggtgatccttcaaaggatcccactgcaaaaaaaaaaaaaaaaaaaaaaaaaaaaaaaaaaaaaaaccagcaacaacaaacaaacaaagccgggtgtggtggcacatgcctttaatcccagcaactcaggaggcagaggcaggtggatttctgagtttgaggccagcctggtctacaaagtgagttccaggacagccagggctatatagagaaaccctgtctcaaaaaaccaaaaacaaaaacaaaaacaaaaaacaaaggctcccaactgatcaaggtcttgggccaaatgtatttaaccagcttctatggtatggtattttaagatttgtttattttatgtgtatgtgtgtgtgccttgggtatatttatgagcaccatgtgcatacagaaaccagaaaggagcatcagattccctggaactaaagttacaggtagctgtgagctgtccagtgtgggtgctggcaacagaacccaggtcctctctaaagacagcaagtgctcttttttttttttaaagatttatttattattatatgtaagtacactgtagctatcttcagacacaccagaagagggcatcagatctcgttacagatgattacagatggttctgagttaccatgtggttgctggaatttgaactcaggacctctggaagagcagtcagtgctcttaactactgagccatctctccagccccagcaaatgctcttaaacacaaattcctctccccagcctgtctactgtaattcttgggaaataagaatcaattctggatcatccaccctccttctgcttgtcagttctcgaagaaagaatgaggtcagttcagccctgctttgtggtttagactgaaattacttttttgagggataatacagagctggcactgtagaaagcacagtcatccttcacctctctgggaagggtgaagctgaccattaggatgggggttgggtgcttaaaccacagggtttctaaatgtcctaatagttcgttagataagaatgagtgttgaagagaaactgaagcaaacaatgaatacaaatggatttcaggagactcctgtttttgaagtacttgtcaaagatcttcagggaggattcagaggggaaggaagctcagcctgaacaggcaatttagcccctaatgtaaggggaacacgtcgcagacacagagtttcatcagtggaaaaaacactgatgaagacagcaagttaaattaaacctagagcctccacaccactgagccccacatttggatattttaaaactctctctcttctctctctctctctctctctctctctctctctctcactctctaagcttttatctctccctctttaagctttcttactctagcctttctcctctctctccttttccccattctctcctcttggccatggctggtctctctccctctttctaccttctctctttccccctgtctttctacaataaagcttttaaaaagagggagttgaagtgaggtcatgtggggcaatgggctatgcacagacagcttggtctctagttgagttaagaggtggaaccccagtacatgggacggaagctgtcctctcatgactcctggacccctggctcctgttgaagttactgcccccacagtcccccaccggagaggctggtggctagctagacatacaaaatgtcccaagcttctgaccttcaggctagactcctcccagttacctagcaacagcaagataacaagcctactataggaggggctgcttagctctctctccctctctctctctctctcacactctctctctctctctctctctctctctctctctctaagcttttacctctccctctttaagctttcttactctagcctttctcctctctctccttttccccattctctcctcttggccatggctggtctctctctctctttctaccttctctctttccccctggctttctacaataaagctctaaaaccatagactgtctctgttcatctagtcccgctgtgcttggacaatgggataggctttttcctaacgagctgcttctaaccttccaatagaaggccttcctgtgctccagccatggaccagacttagaactctctcctgtgtgggaacatctctccctctgctctcttcccatatcttcggggctgagagtgttgccctagagctcctattctgttctcagctcctctcctgtatacagagtgggatgccagagattaagaacctggtaccgggggctgccccttgtccaccccccaaccgtgtggggtcagtggcttcacacagccagatgcccacccagggctgtgtggaaagtgtccggcagtcctcccacatccgcctgcccagagcacaggaactctggctggacgcgggctctctccctctcccctcttcccctacacccacaaccctgcaaggtcacatcagaacatcacctacccaagtggccttgaaggacagggaaccacctccatgtgaaggtaggtaggatttcctgagctggaaggaagattgtgagcaaaggcaaggaaaggaaaatgtgcgaagtgaagagggagccaatgaatatcagaataggacctagacataggaccaccatctctgagagagctctacaggggagaagtcttaatggatgtaaactgagacccacaaatgaggtgggaatgagatctctgccaacactctaaatgaacacgtgctttcgaaaaatggtgccatccaatgagaacagactgtaccctgccctccaatttatccctaccactttaatacttatgggtctttagacattcatacactcagcctgtgagaagagtaatcactgtatttcatatttacattatagggtttatgtgaacaatatttgtgtacagtgagcagaaaaatagcatggtctacttccagacagtcatgcgaatattgtgaagcccccataccaaatgtgattttcattctgttattgctaccatgtaagagtcgtggagaccagggagtgcctttttttctggactaggaacacaaattattttttataaagtcgtttaatgaacaagtgagtacacgtgtggataatactcaggactctcaaactaagcaataaaatcaatctctcaaactaagctgaaagtgtgtcgactgttccatgattctcctggtgtatgggctatgggtagttgcagtcagttggtatcatggtagagaagaaagccagtaaatgtagagtcgttgacgttatctgcatagagtccattgtggtccccatccccatacacctggagccagacttggtctcccacctccagatggaggagcacagagccagaggcctggtccacattcttttcctgatactggtcgtaggtgaagagaacggccttgtccttcttgaagaggctcaccttcacatctttcatgtacaccgtgatgtggtaagagaagtagtagagtcccggaatgttgcagtagaacttgccagtgctgccgtcataatgattctgttggttgtagaagatcttagtaaagcgaatgggtacattgggaacagtgacgcgggtctccagccccacactgaacgctgagcgatacacataagcggcttctccaggctctcctttcctgccaggggttccggggaagccccgtggcccttcagctcctgtcattccaacatctcctgtctcacccttaggaccaagaagacctagaaagtgagaagaattctgtgaatggcgggaacagaactgcccagactgtttccagcaagaggcattatctccggaacctctacccacaatccatttcacaggacaaggaaagacatcatctccgtcatctctgcttcctcactctccacggcctggcaggctcctataagttcatctccagccttagttttcaaagcctttatgggtgaattaaaagatgaatgagcagactgatgatggatatttagaactctcgagctagatactacatccttgttcgttgttctctggttgacatgtgaacgatttgctctggtagaagctcagatttgttagaggtcagttgggtcagtagatgttctgaatatgatttatccacttattcattcatctattcattccttcatcccatgcctttccatatgccccaaagcacagcagatttccagaaagtaatctcctgtaagtagccatatagtcaccctaccctgccagctgtttgtgcactgaccaaccactgtgttgccttctatcccctgtgtccagatgtcctcccccctctaccctctggaaaccatccttttgaggcgtggctcaagccctacctcctcagattagcctatttgttaatctgcatcctcactgagtacaccctatctgtatcccatgccttcagcatctgcacacattcagatgagcatgttgcatgttggaagacatcttctcttagtaaccattacccagagtcttgtctgttgtaaaaattatttaaattccagcccagggtttctaccccacctttgattactaagttctcagatgagagacacacttactgccttcatatttacaacaagctttaaacagcacaagagctgggcagatacctaccctctgtgctattatcaactttcctattgataaccccaagttattactatgttgcatctgagctgctcttggcttcagttgggcagccttcagggccatgctctcaactcttaccccatggccacttccttgctgctccttcacattcttcttcttcacctcctctgaacccaagcacgagaaacctaaactctacctgtgtcgtttctgcccagctattgaccattggcatctttatttaccaatcagaaataacttgggagcagggtcactcggagtcttacatgcagactctctcacttctggggcacagtcttgaggggtcccaaattagcattagaatataagcaacattagggcaattcattacactcttcttcttgactaaatcatggtactgagtgctttagaaatgcgtgaaaagcgcttatgattgccaatagatagaacaagaattacggagaaaacaaaaataggattatgttggtagtatggaaggggtagacagagagaaagagatgcagatggagtgaagtcatggatacctcagcaggtaccatctagtcccactcaaggaggacagtgcaagctccaagatgagtatgaaccataaaacaataaataaataaaaaaggtttagcctctttcttgtgtctgtgtctaggccttaattaatcactggactcaccctgcaaagaccccccccccaaattcaggactcttctacatacctgcatctcctttctctcccttctctccaggagtgccatctctgccatcacggcctggtgtgccattgtggccaggatgtcctgggatgcctgccatccaacctgcacaagttcccttgggtggagggaccaaagcaggagctagctcttcagttgtagtaacgtcatcttcggcatgactgggcaggattaagaggaacaggagagcttgcaacagtagcatcctgagccctgaaattgacaggtgaatagtcatgggaaaggcagactcacatggcacatccaatcaggacctgcatcatgtcctatatagctaagtggaatccactccaaagatctgcatctacatactcgcctctcccagagagccttcagtggctacccagccctcactctcccaggaggtcttcatcagtgtcttagttggggttttactgctgtgaacagacaccacgaccaaggcaactcttttttttttcttttaaactttatgtccttatttatttattatatgtaagtacactgtagtgtcttcagatgcaccagaagaggacgtcagatctcattatgaatggttgtgagccaccatgtggttgctgggattttaattcaggacctttgtaagagtagtcagtgttcttaaccatctctgagctaagccatctctccaatccccaaggcaactcttataaggacactttttaattggggctggcttacaggttcagaggttcagtccattatcatcaagatgggaacatggcagcatccaggaaggtatggtgcaggaggagctgagagttctacatcttcttctaaaggctgctagtggaagactggcttccaagcaggtaggacttgggtcttaaagcccacacccacagcgacaaccctactccaacaaggccacacctcctaatagtgccatttcctgggccaccacgcatatacaaaccatcacactcagacatcctcctctgaaatctgcaatgagtagcaaaatctcctgcaatcagtctcctttcagcctgagaattgtaaatccacaggtggcagggatggcctgattccagtctccccctcctgagtgcaggaccacacacgcagaatatcccaggatccggtcctgggttcctctgcttgttccactcaaatctaaccacctccccactcccaagctcgccttttctccctcgttttcatatacacatgtgcgcacttgtgagcacttgtgtgcatgcattaacacacacacacacatacacacacacacacacacacacacacacctacacagaaactctttggagactacaggggaaaagcaactctaattccaaagaatctgtttattctttaaaatggcaaaaatcacttttcacctaaagatcttctcctgtgtttcagccttgtcattttctagcttttatgatcattttaaatatatgcattgccagtccatagagtggatacggccaaaatatctgtagttcttttaaacttggtttctattttttagcttatgtctacttcaaaatattttataatctgcaacaaatgatatgtattgatttaaaaagaatcaatcaatcaaagctgttttcaggcaggcagcttttctaaaaaacttatctttctattatgatatattcccagatataaatgattgggcccagaaatctaaactttttgtcctcttgggtttttgaggcaaggtttctctgttgtaaccttgactgctctggaacttgctctgcagtccaggctgacctagaactcagagatccacttgcctctgtctcccaagtggaggaattaaaggcatatgccactatgccctgattaacctttttgtaaaaaaaagacattttgtttttaatttatgtgtgtgtgaatgattctgtgtgtgcgattgtgagaagagagagagagagaaagtgtgtgtgtgtgtgtgtgtgtgtgtgtgtgtgtgtgtgtgtgtgtgtgtgtgtgagcccaaggaggccccgaagaggatttcctggaactggagttatggatcgttgtgaggcaccatgtgggtactaggacccaaacctgagtcctctggaaaagcaagtgcaaggtcttaattgtgagctgtttctccagcccacctaaacgtttttaagtcttttaaaaagatttaattttattttcattcgagtgtgtgtgtgtgtgtgtgtgtgtgtgtgtgtgtgtgtgtgatctgtgtacaggagtgaagcaccagtcagttgtgagctgcccactttcagtgctgggaaccgaactcagatcctctggaagagtaacatgctctctaaactgctgagctgtctctctctcagcctctctttaaagtcatttaacatacataccaacattacaagaaacgatgctgccacccaagagaacatgagtgtatgcacacaaagacctatctcgggctgagggtgtcactctgtagcagggcactgccctcgcataatcaaggacctggattccttcctcagcacagcaaagaaaaaaataagcaggcctagctgaattactcttgccagctttgggtagtctcagttttaaaaagtgtactactagccaagcaggatgacacaagcctttaatcccagcacttgggaggcagaggcaagtgtatctttgtgagtttgaaaccagcctggtctgcatagtgacttccaggacagtcagagtgatatggattttctgtctcaaaaaccaaaaaccaaaacaaaagcaaaagaaaacatctgttttaactgttaaatttagtgagcaaaataaatgatcttcattcttcagtcatttctaagatcctcgttaagttcctgtcagttaatttactggggtcacaaagtgtttcttctgcactgttgtgccttggatatgttttgatttggggtcttttgggggagcactattttgagaatgagtttcatggaacccagtcaagcctcaaagactccatcactggatttaagatgaccttgaagtcatgatggcctcattgccacctctcaagtgttgggattacaaaacaagcaccactacatagacttttctttttaagctttacccttttttaatatagagcctttgtctatggcccaaattggcctcaccctcagggtactcctcgtgcgttggcctccctgatgtgggattacgtgggtgtaccagcgggcccagttcctgtaacgtttggctggttttatgtggaggttattgttctctgcacccacagtgctgagactcaaacccagggcctctctactcatctcttcgaggcaactgctctgccaccgagctacatcccgtcccttattaacatctctgcaggcgattgtgtgagcgtgtgtcaccattttgtcttcttacgtcacactgctgtgacttgccctctaggtgcagatcatccttctgtctgtctgtcctcattcccaggtgtacagggagtctgtcctttatttgcttagttctgttgacattttccttgattccaagcaataaacagctcttattcttggaaggatttggtattaccctggtttgtattttcactctctctatataatatcactctttgctgtacctgtgactttcttttaatggtgctataaactgtggcataagatcattttaaatgcctttgattaaattcagccttgcactccctgttgccttggagcatcattctttaaatacccaattctagtttgaccgtacacaaattggaactggcaggtgtggggaggagtgagccagaaacaactgccctagcattgctcttggagagcaggagtctgccctagattggctcataatgtctctgagtgcctctgtcgccatctactgaatctggagtgatcaaaaacccagtctcagaaactgctacaaagaaaatgaagcagagcttgccctggaactttcttatcacagtcagtcagtcagtcagtcagtcagtcagtctattggttggttggttggttggttggttggttaatgtgtgtgtgtgtgtgtgtgtgtgtgtgtgtgtgtgtgtgtgtgtgtgtgtgtgtgtatggtgtggtgtgtgtgtgtgtgtgtgtggtgtgtagtggtgtggtgtgtggtgtgtagtggtgtggtgtgtgtgtgtgtgtgtgtgtgtgtgtgtgtgtacccacagaagttagagaacacctgtggaagtcagttctctccttctaccaactgtgtcctggggaatgaactcaggccattaggttcagcatctttactcactgagtcatcttgcccgccattgctctgagacttttaatattgtgtgtcttatgtcaactctgcccttcttacagctccagcaatcatattcctgaaaacttcaactcaagaatctaagaagcaccaatcttttccatggggaaataagaaagacaccaaaatgcttgaaatggaggcaggtaaggagggccccaaagacaaagggtagctcaaaacagatccctaatgctggggaggaaggaagagacagaactctagagttttcagttctctctctctactgaaaaaccaataatctttctcatctaaaaacacattcttcccccacgcctccatgtccttaatgcttttctctacttacaggtatggttgttctgggattccccgagtgccatgggactgaagtactaagcgctgcacacccttagctgttctttttaaagatttatttttattttttaattatttgaatattcatgggggtatacacctatgtacaggtacccacggagggcagaaggcattggatcccctggaactaagttaaagacagttgtgaaccaggttctttgtgaaatttcctctgcagatactgttagctgctgagctctctctccagcccctaagcctttggctgataaggacagatctcactgaaggcttctctttcaccgagttctggatgtaaagtcaggtctggatacccatgaaggacaacacagaatgcctcttttttaaaaaaaaaaatattccacattgtttctgttctttatgtagacaaagcaaatgttgcactctgactttgaaagacttctgtttctataaggaaacactactgaatggaaccaagtgcaagagatgaatctacagctagagcatgttacaaaagaaacattgtagataggtgttggaggtagacagcaaggatccagtataatgctttgcatttggaaagcctttgttccaccatctcattgaataaccacagccgttttggagacaatactgggggggggggttactcaaaaagatgcatgctcgggtacaaacaatcagttttgccctttatgtgtttgttggaagactaagcgacagactccatgaaccatgcctaggggggtgtctggagtaagccagtgagcaatggctgtcacttaggactgctctgacttaggggtgaggaactggggctgctgggtgcttgagtgataatctagatccaacagaacccgtggaagtagagtcctggctagataacctctggcacagacggggaagagaaacatactaccgtcacataccctgccttttagtacccttccccatggggaaagggtgagagaccagagactgtcaatccaatggcctagcttgccagccccctcctcattctgcccctatttgcctccctggctttatgctctttgcctagaaatgtgatttcacaataatatcataagacccagttggcagaaagtgcggagtagtttacaaacttacaaaataccgtacacgtttgtgagagaaggaaagtaaacaaatattaacgtatcaacccactgtggacagctgctgagtttcacttcactcacacagccttaaggggaagaccgacagctgagacatctgggagagggaaaggtttggtcatttctgccaaaataagaagcaaccaggtaggaccaggcgtggtggtgcacacctttaatcccagcacttggaaggcagaggcaggctgatcgatgtgactttgaggccagcctggtcgatagagagagctctgctatttgttatacagagaaaccctgtctcaaaatgtttaaaaaatgaacatgtcatccaatgacccactggccttcctagcaaaccacacatgagttatgcagagggatggctgcatgtttcaggaccactgtatagtgaaggggatgtgaaattcctctttgacctgctggcattttagcaccaacatccagaatcttgtgaaattcaagactggagtttcctctgggactggcagagattaggctacaaggagagagagaagaggtcaacgcccccagccagtaaagacaacaaaacacagagaaatgccagagccaaaagcaactccaggacctcccatccttgcttgtagaaacagaaagactgagtgcatttcctacatcctcatggaagcgctctgtgtgctggacacctggcctgttggttgttttcaccttcactcatgaagtggtacccgagggtagagctcagtggaggggcatttgcccaatgtgtatgaagccctaagctcaaacctcagaagcacacaataaacaagcaaaaccagataaaaattaagttaatatttgtaatttcacaatggcacaacccaatcataaatggctgtgccaggagctcaggcacctctgtctagctcctaagattatctggaaggtgtcactcagcctttggaaagtcggtagcattctcatgtccggtatatatgtgtgcacacacttgtacactctcaagaaaccagcaaagcagagcatccctccatgaagcttgtagggcgagctcctgattgaagcctttgctttccaaaagatagcacctcctgactttagcagagcacatggggactaccggtcctctgagttgacaagcagctggaatgtttatctctgtaacctccttggaaaatgacaaaaatgagggctaaggagaacgcacttcctgggcaaggatgacagcctgaattcaacccctggatctcccataaaaagcaagatgcggtggcgatcacagtctcctgaggctgacggtgggtggacgagcagaagaaacaagagaggaggaaagggacgactcccaaaagttaccctctcacctccatgtgcctgccatagaatgagcgtgtctgcacacattagactcttgtgtgtgcttgcacattctctctcaagaaagcactaatacacacacacacacacacacacacacacacacacacacacacgcatgcacgcaagcacgcacgcacttgcacaaataaaattttaagtgcttgggagatggctgtgttgattagtgctttctgcagatgcatgaggacctgaatttagatccctagaattcatgtcaaaagctgtcacctttaaccctgacactggggtaggggatgacagagacaagaatatccctagagatcaatgacctcagtctggccttcttcgtcacgctccaggttctgagagaccttgtctcaaaaaaataaggcagagattaagaaagacacctcatatggagagacccctctggcttccacatacacatgcacacaggatcacacacacaaggctagaagcaagccctgtgccttgtaagattcctcgaaacacagggagagaggcatcaaggatttctcactaagccttgggaaccaaactgctccaagaaccaagatgcactctcacgcccctctggcctgctccacctgccctcttgtccacagaatgactctgatcaaattctctgccatccttttgaatgacatcacagggggagtgaggtggctcctcttgtgaggcttgattcagaacccattctcagcatgcacttgctccctgcacttgggagccagggaggcaggtggatccctgtgagttcagtgatggcctggtctttataaattccaagccagtcaggaatatatagtgacacccagtctcaaaaacaaaatttcttcagacgagggacttacgtatcatgacacacaagaggctgccttgacttccaaacccctccctccttcatctcctctacctccatggttccgatgctgtgttcatggagcaagaattaggtttaacaacgacaaagcaggtgcagtgcctctgtcagaaaatatctttcaaaatgaggctttctgtccagattgccactattttccaggttctcaccactttgtgtcacccaatcccctaaaatgtctctatgcagacagatgtccccaactcctccgagcacacccatgttttcactcacagccctgacaaagtgttctacagcgcatgctccgtgcatatctgctcagtagaactaagtgatagagacagatcctacagtctgacctcaactggacttcctcgggctgccctctctgcctgcttctcctgtcactgtaactcttaaagccgagaagcaacagatcccactttccaacagagtctcatctgtggatcgaccctcctacctcactatctccaggttctttttgcagtgggcatcctgccatcaaatgaacagggcaaacttccggttaggctcaagcttgtggaccgaaaggttattgtttctttcttagagctttgaagagttaaagaaaagccccaaagcttatctgccccaaccatgtttccaaggcctgagttttctcaacatctaccttcacactgctgcagagagcaaaatctgaacacagcccaagtgggattctgcattcatacccagccagccgagaatatagaattgttcttaccttttggtgtcgtcagatccactgacaatcgtacagacagaaatgaggagaaagtggccaggtctcattagtctggtactcatggggacaggcagaccccagcttaccattggccaacccagtcaaggccaatagccaatgagtgggccccttgctcctggcagctgccttaagactccttagggaacctggtttaatccagcttgggtctgggaagccaagtagagcttctgtcaagccatcctgtttccaggctttggccattctctaccagagcaagagatggggcaagggtaaggacaataattcagcatgtttctgagtgcaatgaaaattatcctcaagtaaaatgattgttcaggggtcaggagacctccctttcccataagtttgtcctggagagtcaacaacactaattgtcacatgatactcccactctttctttgtaactaaatgtgaagctgtgtggttcaggcattactatttcagtaagaatgaagaggggctgtactagaataaaaaatagatggactgcaggcatggctcagtggttaagagcactggctattcttccagaggtcctgagttcaattcccagcacccacagtaattccatgggatccgctgccttcttttggtgtgcaaatatgcatgcagccaaaatacccatatacataaacaaatctttaagcaatagaaggtgtgctccacttgctagaccggatcccatactgagaaaagaccatgtagatgaattctgagggctgttgtacaggaaggttcctggtggggtgtgaagcaagttcaggggtccaaattctaaaatctgtggtccctacataattcaagcccagtgtcacagaacacttaccttgacattggagaaccatgttctaagatttttctgggtaagtttcaagctagttttttagaaactcattttctgtgagtagataaacctcagtttccagactccttaagtatataccttttctatctattattagctctgggctaacagccaactgcaactagcagtcaccactcactaaactgctcctaaaaggcttgcagttggcaaggcaataccttgggagcctctcggcggactcacatcttatttttgaaagaccagagctgattctcgggagcacaaagcttttgaattaaatcgtgaatccaaaaagaactctggatgccagcagctgctccaataagacactcagagctagactgctcccaggcaaaggctggccaagcatctgcttcctccaactgccaccttccactggccacacagagcctaagagtcatgcttttactagtggataggaccagcagtgtcaacccaccaaggaaggagagccaaaatatgatcttccatcttgtcttcctgttaatgcactgatgtttctagagaaatcacgttaggtcatgaagattaaggacacaagctcatttccaagggctgttagttgtgaccccatggccctggacacttcccaagcaaactgtatgaagcaaaggagagagaagaactacagcaactcaaagctgtatcactctctatctttcccttagcgttttgcttactttgtgtgtgtgtgttgttgttgttgctgttgttgcattttcttacttattttgtatgtgtgttactgtctttcgcttcttactggaatgcaaacacgctggagcaggggctttacctacttgaggttatgctccataacccctagactaagtagtatcttgtacaaagtaagtaacaagcaatgttgagtcaaggggtagtcgagtcttcccatacagatacctgtggttgtctcccacttaatgaagaagccagaagccagtaagagggagagacacagacccaaggcacgaagctagatctctctgaccacaaagggcatacgctccccaatgcctcgtggtcttcacctctgctcagttatagcctccgggttagctctggacccctgtcccatataggaacactgctggtttcagcagattctaactattgcacaagacagagtgactttcaccccaaaaccacatcaatactttgctgggtctggtagacacccgggagcattgtgaaagcctatcatttggtgaactctcaggggaatccgccactcaccacagagggcattgtgtaaaaacacacacttgcttagcgactagaagtgaaaaacattcaaccacacatgtcttgaggctaggcggtttggttttttgctgggtggtttttttttttgctttgtttttggctttgttttattttgatttttttcttttcttttcctgtttttttttttcttttttggtttttggtgttttgttttgttttgttttgttttgttttgttttgttttgtttttcaagacagtgttttttcagtgtagcccaagctatcctggaacttgctctatagatcagactggcctcaaactctcacctctgcctcccaagtgctgagattgacgttcagcaaggctgggtttacctggacagatgtgttactgcccagagtgaagcagccacagaaacgtggtcctttccttcaggagctcatgttcacatctcaattctcgcctacatgcgaagtgagatacttaaacaaaaggccagatttccccacaggcctgagtttcctcagtgtttcctgaatgtggttaaatttcactgtatattattgtttagtcatgactttaaaaagacaatttactgaaacaactaaacctcaaatcaaattttgagacataacactaactgcagaagagtgagcctgtcctgcagtactccaaatttttgggcattcaagaaaggaaaaatgtctttaatttagaagtgtaactcagtggtagagtgatttacattgacacctgacctctatccctgatgcctgaaatataaagaaaagaaaagctgtgttatccacagctattcttcacttcctttttttttttttttttttttttttggtttttcgagacagggtttctctgtgtagccctggctgtcctgaaactcactctgtagaccaggctggcctcgaactcagaaatccgcctgcctctgcctcccgagtgctgggattaaaggcgtgcgccaccacgtccggcttttttttggttttttgagacagggtttctctgtgtagccttggctgtcctggaactcactctgtagacaaggctggcctcaaactcagaaatccacctgcctctgcctcccaagtgctgggattaaaggcatctgccaccactgcccagctattttttcattttctgagaacactccagactgacttccactgagattggactagttatcattcccaccagcagtgaatcaagtgcatcccatctgtctacatccttgacagaatgtattgttgtttattttcttatgaaaatgttatttgttttcttatgacattctgactgggtaaaatgggatcacaatgaggtgttgacttgcttttctccgaaggccagtgtatcagataagtcatttggggagagaacatcagttggggaaatgctcccaccagactgccctgtgggcaagcctatgggacgttttcttgcttgatgattgaggaggtaaggtccagcccattgtggtgctgttaccatagacaggtgctcatagatgatataagagagcaggctaagggctggagagatggctcagcagttaagagcactgactgctcttccagaggtcctgagttcaaatcccagcaaccacatggtggctcacaaccatctgtaatgggatcctatgccctcttctggtgtgtttgaagacagctacaatgtacttagatctaataataaataaatctttagactggagcaactggagccaactagagcaagcagaggccctgaattctaattcccagaaaccacatgatggctcacaaccatcagtatagctacagtgtactcatttcatgtattttatatacataaaataaatgaaataaaataaatctttaaaaacaaaacaaaacagagagccctgcataactgtgtggagtgtttcttcccctatatcctagatgtcacaagagatacaaatacactcttttgtctgagtcgtctcatcgttgggtctgtattatagcagattactaatgcacatggcatatgactatgtacaaaggaaagaatgttgcattcaaaatgttagataaatagtagggaccttcagggaaatgcaaatcaaaacaaccctgagattccacctcacaccagtcagaatggctaagatcaaaaattcaggtgacagcagatgctggcgaggatgtggagaaagaggaatactcctccattgttggtgggattgcaagcttgtacaaccactctggaaatcagtctggcggttcctcagaaaattggacatagtactaccggaggatcccacaatacctctcctgggcatatatccagaagatgtcccaaccagtaagaaggacacatgctccactatgttcatagcagccttatttataatagccagaagctggaaagaacccagatgcccctcaacagaggaatggatacagaaatgtggtacatttacacaatggagtactactcagctattaaaaagaatgaatttatgaaattcctaggcaaatggatagacctggagggcatcatcctgagtgaggtaacccaatcacaaaggaactcacacaatatgtactcactgataagtggatattagcccagacatttagaatacccaagatataagatacaatttgctaaacgcatgaaactcaagaagaacaaagaccaaagtgtggacactttgccccttcttagaaatgggaacaaaacacccatggaaggagttacagagacaaaatttggagctgtgacaaaaggatagaccatctagtgattgccatatccagggatccatcccataatcagcttccaaacgctgacaccattgcatacactagcaagattttgctgaaaggacccagatatagctctctcttgtgagactatgccggtgcctggcaaacacagaagtggatgctcacagttagctattggatggatcacagggcccccaatggaggagctagagaaagtacccaaggagctaaagggatctgcaaccctataggtggaacaacaatatgaactaaccagtaacccggagctcttgactctagctgcatatgtatcaaaagatggcctagtcggctatcactggaaagagaggccctttggacttgcaaactttatatgccccagtacaggggaatgccagggccaaaaagggggagtgggtgggtaggggagtgggggggtgggtatggggggacttttgggatagcattggaaatgtaaatgaggaaaatacctaataaaaatttttttaaaaaaatagggacctttttaaggtagaagggttctggtagactcaacgcttgagctcttgccttctatcaaagttcatagttctgggaaagcccctagatgcgctaaccttgctttttggctcctttagttctgcttctggctaactgttcttagtaacagaggggtgttagcccaggatatggttttctgcttgaaaactcaccctgaaaaaggctcagcattgaactaggtcagaaacacccagcaaagctggtcaccggacagcttcctattgccttgaacccatgtctgagcagtcttctccagtggatatcacccgacagaacaattctcccaaacgttttaagagactttcatcctattttttgccttaacaaatggagaaatggcaatagttttactcacaatcatcttgtcatcttacttacaaactgctttaaaaaaaaatgtatttatttattatatgtaaatacactgtagctgtcttcagacacactccagaagagggcatcagatctcattacagatggttgtgagccttcatgtggttgctgggatttgaactcagaacctttggaagagcagtcagtgctcttaaccactgagccatctctccaggcctcgcaaactgctttagcaatgtaccacaacagcagttcagcagacaactgttgtctgaatagctatcatgctcaagaccctgaagaggcaggcacagtgtctaatggaccagagcacttggtgaagcacctggggacatctagccatggccagtgctggggaggctcctctgtcacacacctgtgacatgtggtcatcagagactctgtccacttgtcaggtcaagcactgtgtcctctgaaagcattatcaatcatggacactctcacggactcaaggaaaggctcgtgtctagaatattctgtattgtgtctctgtagtgaacaacagactacttggtggtcaaacgaaaagatccgtgcagtatttcctgaagcaagtacttagaattctggagatttttctcttagcaaaagctctgaaagtttcacataaaatgtatagattatgaccaacaagatacgtaggtaggccatcttacacaaatcaggccactgtaacaaaatactacaaactgagtagcttacaaaacacaaaattacattagcatcctgaggactggaaagtcaaaggtctttgtatctggtgagggactgctttctccactgcaattggcaacttattgctgtgtctcacataatggaagacccaaaggagacttggccatctacatgggcactgtccccatcctaaaaccccaccttacatgttagagttccagctatgaactttggagctatgataacattcagagcctaagaaaagccaaagcacatgatgaagaaagacagtgtaccagggggttgttcccaccccatctcacacatagactcacagacacacccacacattgagacagacagcaggagaatagagtatgaaatctgtgacgacacaccatcattgatcatgtgggctacatttttgacttggcatgtccatgttaacatagcaaaggactctgaatattttcctgacctgttgaatgtccaagctagattggatcctgtgagattggaattggtagagaactgacactgcttggcctctgacctctacatacatgccatggcatgttcatactctctcacacacacgtgcactcacatgcacaaaacaaataaatgtttaaattgcatctgaacatgtatacgcttgtcttgttataattctctaacagcatcatctgacaactactcccatttacattgtgttaggtttacatgcaatgtcaggtggagcacatggaaaacatatacaggatacacaaatactactttatacaagggacttgagtctctgccacaagtttcacaactgttgtccagctgggtgggggtggggcaagcggggacaagggtctcatctcagagcagcaagggtcttctctcagagcagagaaggccactgggtgatgctgcccttttgtcactggagtcccaagcaggagcccctggttgtgatcaaaacccagcactgacaagaaagtgcagggtcccatgcaaaactcagcttcctggccaggccaggtgttaatgggagagaatcctggagacaggggaaggggctgaggagaggggggcagctggtgaatggcaatgagggagggtatgggggagggaagaggaagttacactgggtgctcttctcctttccagagtttctgcttctgccacacctccaggaatcttcatgggaacagctccctgctgaagcagccttgaggagccagatggaggatgtgggcccctgtgcattggtccctgccaggagcaggtatggctgtcagtgctgcctcaggactcctgttcccccaggccatctactgtcacctgggcttaggggtgggagaattctgtggagtccaggcaacctttccagctctaaagtgctgtgggtggggaggctttttaacacagttttcatagtcccacctccccattcctccaagaaatccaccactgcccttgggcttggcctctgtccgtcctccccaccctcttccctgtcccttctcactaaagttcctggctcacctcttccttgtcttctatcacgtgttgcagctcttccacttgggaagtcataggagcaattaagaacatccagcctctcatgccaatgatttgattaattaatctcttggttactttctagtgcacaggtacctagtatctatgatagccctgggactgtgtcaggattagcacccatctggagagacactcttctgtgctgtgtgggagcatcagctgtcagttaaaagctgatgtccagtaaactgaggcagcgttagagggtggaagatgtggcaaagacactggaactcttggagactgtgtttctctaaagtggaaagccaaagccagggctctgttcaggatgtcagaggcaggagatttgcctcgactctaggaacatgaagctgaggagaggtgcctaaccatgtggaagacatagaatagtttaaagggttatgtaagttagatgctagtcagagaacagaccaaagcttatggcataggcatttgttatcaaataaaaagcctctggttggttatttggaaactggggcgtgggtggaaaagcctgtggttacacaccagctaatactgaacaactgctagccttgttcctggtgagatatcaggtgctcacccaaatgtcatcttcccagtgccccaaacttctagccctgtttttaggtggagaagctgagatggaaagatccttggctacatcctgtagctggattctacaagatccctgctttcgactcccacccccactgctagggaggcagattagcagggcaagcatgtgcacaaaagatcccaacaactggatggctgcagagatggctcagtggttaagagagggctctgtgcatgcagaggactcaagttcagttcccagagcccacaagagaggcatccaactgtctctaagtccagcttcccgggatccaatgccctcttccagctctctgcccaaatgctcttgcataaacacatactcagaaataaaataggctatttaatgaaaagtactccagaaagggcatcgcaggactgaagtcagccgagtaaggacctctaaagtggagacccaagggaggcctctgttcagggatgttccagggctcggggagccccgatgagtgggtacagctgaacaagtgaacgactggagggtgggcactgagcaaaaagggcctgggcttgggaccagaggcacagtcacctcacccagcaggcaagaggctgtggaagattctcactgctgcttagaggacccacacaccattctgaggtgagggcttgctcagaacaggtgggggtgcagtgaagggtggagcaacatagggcacagcactcaatgcctctgggaagtgcccccagatgtgggaggctgtgagggcagctggacagagtctgtagcactgagcagcctggttggagtcctatcctggaatgtagtaagggtgagagcatctggctcaggcctcacctctgtcctccagctgtggctactggagacaccaggaagtttctctttaggccactcaggccctggagttccctgacagcagtgggcattgtggatggggtggaggtgacagtctttccactgtgagggagatgtggaggggtggatgagaaatcctggattactccctgtatgaactgaatggaccatacccccagggtcagtagctcaggatcccagatgctgccagggaccacagagccaccacacatacaacactcctccatgaaaacgattttattttgcaagaaaggaagctgactcaccagagtacagctgcagtacagcagccaatcagtgaaattcaccatgcaggaacgagcacagttgagacatttccagaaggtcagaagacggtccttatccctatggtggggacaacagtatttgtgacagtcacctcacaaaaggtgggggaggtgagcagcacctgccaatctgttaacagagtgagagcagcagccatcctctgagcatcactagatatgcagggagtgcgctgcttctaccatctggggcagatttaactgccaatgtctccatcctgggaagcacagacatgaaggaaatggccttagaagtcaaaacatggtcacaaacatataacccttaagatattcatcttgtacaccaatattttagcagtttttgtggggagttggtttggtttggtttggggttttggggttttggaaacaaggtttctctgtgcagtcctggctgtcctggcgctcactgtgtaaaccaggctgcctttggagtgctgggattaaaggagtggaccactgtcacccagcaaggatttgtgatttttctgttttgggatttgtgattttaagtggaacagtttttatttatgattttgctcagcatattgggggaagacatgaccctcaaggccttcaggctatttctggtctaggtgctgatataaatgtgaggagttcaagggaagagcaacactagattgtcccctctctgttcccttttcctgactgtggatgcaatctgaccagctgcctcacactcgggccaccatgaccttcccacggtgatggacgacgccttcaaactcagaagtgaaacaaacccttcccttgtagggggagggggagccggaggagcgaggagaggacgcagcaggagagttccgggcatgaaatcttgagagcctctcactctacaaactttatgctttgtagcaccaaggtacaagtattttggaaaacttgatttgggagtctagggtttagaatgttgaattgatattttcctcagatacatcaggtagtcaactcatatgtagccttggtaaaggtttaaccacactaatggaaaagcacttggtaaatgacaatgacaaattaattttgctctggtctgatttttctcttcttgaccactaggtggcagactgaagccacaatagagaagatttgcaagtcttcccaagtttaaactggttaaattatgtttgcttgcttgcttgtttttgcaggggaggaggttggttttttgttttgttgttgttgttgttgtttgtttgtttgttcgtttttggttgggggttggttccttcttttatcttgtgagaaagaaaaggtcgcgcatataaacacagggcccttttcgggtatataaatgaggcatactgagctagctggagctgccttaaagatctttctcgttgtggcatagagtcagaggcaggaggatggtggttacaacactaacctgggcaaaacagcaaatttaagtccatcttcaaatgcatagacagaccatgtctaaaaagaagccccacaccttctcagtccttgtctgtctacagcttcacaggccaaggctttatcattggaggacattgacgcctgagccggcacactaacccaggtgaaacttcctttgaacacagcaccatacttacttgatctttctagggagacaacatactttcaccttcctgttgtcaggcgaatgagcaggtacatacctggtttgtatgaagtctttattaaatatcccacatgcaaaggagggggagaaaaagtagggatgggggaaagagggagagagggaggaggaagagaggagggagaaaagagcatggtgaggtagaggaggaggaaaggtcatttaaaatacaatgttttaaaatcgcttacccaaaaagacagagttgagcttgaagctggaggtgtgtaggatttcactcactgtttattggtgccaccaatgccaccgccgttcccactgctttcctcatctctcacttctgagtgttaaatgaactgagcggggaaaccttgggattgacctacgttcctaaactggatccacatcttttaccaagttttattttgtgaaccaaacctaaacctgtacatattttgaagtgtataaatccgagttaaataatcacttggagggaattggaatacttaccataaaaattaaaaatacgtctacccaagcattgtagtgcacgtctttaatcccagcacgcgaga

SEQ ID NO: 1025 - DNA, 46 bp, Homo sapiens
tgatcgcacctattagtggagaaatctgtccataatactgaagttt

SEQ ID NO: 1026 - DNA, 44 bp, Homo sapiens
tgggtaggcagaatagaggaggagagacatcctagatggagggg

SEQ ID NO: 1027 - DNA, 4046 bp, Homo sapiens
ttaatttccgactcctctctgtgtagctctgggatcttggaaagccacttaacctttctgaagtcccctttcctcatctctaaaatgcatacactcatcactaacatttactgagcactgacatgtgccagacaccattctaagcattttacacagactacaccatttgatcttccaacaaacagaacactgaaacgcattacaggtcagaacaaatgatttgtgcctaagcaccaagaccgtagagcccgtgctccctattctaccctatcctgtctctcaaaatgattgtgagaatcgaatgagacactaggtgagaaaagggttttataaatagcattttaaaaattttttaaagtccacaaaatttttaattttaatacagataaaatagatccctttgttttataaaaagtaacaaaatttgttatacaacaactatgttatttattaattttgcctttttgtatgctgccaggaaagaaacattaagaaatcttaaattgattatggtgaatcagaaggtctgcctggactttttattgctctaactgtacagctgatcatactacctcatttttttttatgacacttcaagggtgcgcttagcttcatcactccttcgttgccaaaagctttgtgaccaaaaacaattaagcagattcctgagtcactaaatgacacataaccagagttgagacttaggaacttttagtgccatgctaagcccacagggacacaacaaatagcattttacaaaggcaaagaattgtgacacttgagatttagcttgttgatccttgtaaaagttttctttttaggcataattgagttttagatcatagtactcactattacttagtaataatttttttctgatagaaatacagtgtaacaggccgggcgcagtggctcatgcctgtaatcccagcactttgggaggccgaggcgggcggatcacttgaggtcaggagtttgagaccagcccggccaacatggtgaaatcccatctctactaaaaatacaaaaaattagccaggtgtggtcgtggattcctgtgatcccagctacttgggagggtgaggcaggagcatcagttgaacccaggaggcggaggttgcagtgagccaagatggtgccattgcactccagcctgggccacaaagcgagactccacttcagaaacaaaaaaaaaagagagagagaaaagaaggaaggaaggaaggaaggaaggaaagaaggaaggaaggaaggaaagaaggaaggaaggaaggaaggaaagaaggaaggaaggaaagaaggaaggaaggaaagaaggaaggaaggaaggaagggtaacaagcaaagtgtaacaatggcaatatctaaaaaaataggtatttttatatgtttgtcgttttatatatatgacccccactttagagatgaggaaactgagagattaaggaaacgatccctgagagactctgttctgacttccaaatcggtgagctttccatcgcatcacggtgcctccgaaagcatgacacggagcttctcagactcagcttcctaatccgctaaacgggattatgtgagatgaggaacatgagaacgctgacatgggtgagggttccttggagtatcattttcatgtggcattttcaaaacttattttacctaatcttcccaaagccctgcttttgactctaatgtgtctcctgagacttggagagcgcaagatgctagcgacagagcaagactccatctccagataaataaataagtaaaataaaaaagaacacaaataattttgaaaatttttttgaaaattaggcacgtttgcactgaccttcaattgttattaattgctggtttcccacccagaattaagttggaatgcaactttcttttacaatcagagtccgttcttggtcttggaaacttctgaggctcctgtgctaatcacactcttgtatttttggcacctctaccccgtgccactgtcatggaacccaggctgatcgcacctattagtggagaaatctgtccataatactgaagtttggggacaaacagtgttcccttagggtaggagaaagagatctttatttttgacaaagggggaggagccagaaaactccagagacccctgagtttgccctctctccaaggtttggggtaagccccccgtcaccctttatctctggggctttcacatattctggattctctcctcctgtttcccagcagaaaaggatggagcctcacagattcttcccatttctggagaaaaacatgcatggagctcaaagttcttctcaggagttttattgccaaagccataataagaaagggtggaggtgacaagcagtgaggaagtttaaagatgcatgaaatctgtaaagtctcagaacaagaattctcctaaaatgcaaaaggggctttgctggtctccccttggcttctcatgtagctcacctcttttttcttatcttgagactagtcaaacctaagctgtttctcattttatttccagaagctattgagaacactctcctgaattcttcaaattcagtagagggcgacaaatgtacatataaatgatggtagtgggtcttaaataaagactcatgacacctaaaggggcagcacctgagtctgattgcacctgtttctgttgctgtttctgtctctcttctctctgtctgccatttcattatcaatggttactttacttataagatcatattagaacctgatatttgataaatgatgcatcagatctatagtgagagaaaaaattaatgcaattaaaggtgttgtaacagctagtcttcaagtggggagaaatcatttgagtaccttaggtcacagcttacatcaaaacaaaaaatcagagctacattaaaaagtgaaattttaactatatcaaacaatagaaaaaaacagaagaaaattgaatacttactaaatcttagcatgaataagaactgtttaacacttagaggcaaggactgggcgtggtggctcatgcttttaatcccaggactttgggagcccaaggcgggcggatcacctgaggtcaggagtttgagactagcctggccaacatggtgaaaccccgtctctactaaaaaatgcaaaaattagctgcgtgtggtggtgcatgcctgtaatctcagctacttgggaggctaaggcatgagaatcgcttgaacctgggaggtggaggctgtagtgagccgagattgtgccactgcactacagcctgggtgacagtgtgaaatcctctctctcaaaaaaaaaaaaaaaaaaaagcaaactagagcagtgaggtaccattatttcctttgctcactaaactgacaacacacaaatgttttttataatacccaaagctgatgagggtagttaaggtatgcccttttatacacacactaatgatgtactactggttggcagtataacatatgctgccatgtggggatatgtatcaggagacttaaaaatgtgcataccttttggtccagtaatttacttctgggaatctgtcataacagaataataatcttggggaaagctacatgcctaaggatatttaaaatattatttaaaaatcaaagtataatttcttacagaatataaaataatattttaaaatgaaaatatgctaaaagtttgatgaaatataaatggtcaaatatatattgattatatccacttactagactagcactcactctgagacgttaaaaatagtcattataaaaactagaaaatgccaaagacaaaataaaggaataaagttttacataaagtatgattccactatgtttaaaaataaacagagacattcttggagttgagtattgttttcttttctgtcatgtccaaagaactatataactattatttttaatgaactatatatgtaatatatacatatagtttatatgtatatacaaaatttatctcatatatatgataaagatgaaagatgagttggatgtgccacgtgaagagggtagtatagaaccccaggtaatggggcataggagtgggat

SEQ ID NO: 1028 - DNA, 4044 bp, Homo sapiens
atccattctcacactgctgtaaaaaactacttgagactgggtaatttataaagaaaagaggtttaattgactcacagttccacaggctgtacaggaagcatggctggggaggcctcagaaaacttacaatcatggtggaagaaagagcgaaggggaagcaagcacatcacacagcagcaggagagagagagagaaagagagagagagagaatataggggaagtgctacacactttcaaccagatcttgtgagaattcacctactatcatgagaacagcaagggataagtctgcctccatgattcagtcacctcctaccaggccccttctccaacacatgtcgacgtgctatttgggtggggacacagacccaaaccatattaccagggcactggagaaacacagaggggaaagaaccagccaaggagtgagatggagaacaaggaggacttcttgaaacagatgacatccaaactgggtcctgaaagctgaatagagattagacaggggaggaggggcagctaaagatggctcaggcaaacaaagggccaggggatatgttcatgggatgatgtgtctctcgttgtctgcttaacacaaggtgagtctctccctccctctctctctctttttctctgtgtgtgtttgtgtgtgtgcatgtgtgcaaatgtaatatacccaatagtcaaacatgtgccccaggagaggggtagaggaagaaagagaatgagagagtaagaaggaggaatagacacagaaaatgagagagaaggggggaaagaaaaagaagaaaggagccagaggagagaagctggttagcattgaatggagcaatctgtgtcatcgtacttgggaaacccaaggatggattcttggcaagtcgactcttggagctttccctgtgcttggtcctgtgctcagacatgggaaaattagaggagtgtcatctgtgcaatcactgaattcataatcttggtgaggaaaggagactacacacagggaataatgctaagtattacagatttcagggcagaaagagatcaaggtgggctgcaatattcagaaaagtcttcctggaaaagttgaatacttagaaagcagctcctagaagtagactctgctgagatggacggagtcctttgtaggtcccaactgggtgtgtgtgtggggtctgtctctccatggctgacagtgcacatgtggattccagggctcaggatgctgttgctgggagctgttctactgctattagctctgcccggtcatgaccaggaaaccacgactcaagggcccggagtcctgcttcccctgcccaagggggcctgcacaggttggatggcgggcatcccagggcatccgggccataatggggccccaggccgtgatggcagagatggcacccctggtgagaagggtgagaaaggagatccaggtaagaatgtttctggcctctttcatcacagacctcctacactgatataaactatatgaaggcattcattattaactaaggcctagacacagggagaaagcaaagcttttttatgttaaccataagcaacctgaagtgatttggggttggtcttccaaggatgagtgtagatggtgcctctataaccaagactttggctttgctgcatctgcagctccttttccatcccctttcccatcttcaccctcatccctattcccagtacattcatattctgattcctctttctgtctgcttaacttccatttcacccagtggcattcaaccacatttactgcacaccccctgaaaggctcagtcctgcctttggggaactcttgatctaggtaagatgtctaatgtgcaaggctctgttggtggttactacaagaaagtctactctaaaaatgtcaaactgaatgtgaacaagtattcaaagtatggagcatagagaaaatatactcaccgtggacctgatgaagaatgaaggcttcaaggaggaggcagagcttcagctaggccttgaatgatgggtaggcagaatagaggaggagagacatcctagatggagggggtagaattgcaaaaccagggttgatggtgccagcacataaagggctggcagggtggagggtctatgatagagacctataggagataaagatagagttgaaattatgggagcctccatgtctgtgggagatatagaaggaggaggtaacacctctctccttttgggagctcttattggtttcttgatctataagtcaagaaggttgtgagtgggagccacagggatggtaatttaggctgtaaccaacctaggcaggagttctgttctttgtagtcactgaggtcttctcattccttaggtcttattggtcctaagggagacatcggtgaaaccggagtacccggggctgaaggtccccgaggctttccgggaatccaaggcaggaaaggagaacctggagaaggtgcctatgtataccgctcagcattcagtgtgggattggagacttacgttactatccccaacatgcccattcgctttaccaagatcttctacaatcagcaaaaccactatgatggctccactggtaaattccactgcaacattcctgggctgtactactttgcctaccacatcacagtctatatgaaggatgtgaaggtcagcctcttcaagaaggacaaggctatgctcttcacctatgatcagtaccaggaaaataatgtggaccaggcctccggctctgtgctcctgcatctggaggtgggcgaccaagtctggctccaggtgtatggggaaggagagcgtaatggactctatgctgataatgacaatgactccaccttcacaggctttcttctctaccatgacaccaactgatcaccactaactcagagcctcctccaggccaaacagccccaaagtcaattaaaggctttcagtacggttaggaagttgattattatttagttggaggcctttagatattattcattcatttactcattcatttattcattcattcatcgagtaactttaaaaaaatcatatgctatgttcccagtcctggggagcttcacaaacatgaccagataactgactagaaagaagtagttgacagtgctattttgtgcccactgtctctcctgatgctcatatcaatcctataaggcacagggaacaagcattctcctgtttttacagattgtatcctgaggctgagagagttaagtgaatgtctaaggtcacacagtattaagtgacagtgctagaaatcaaacccagagctgtggactttgttcactagactgtgcccttttatagaggtacatgttctctttggagtgttggtaggtgtctgtttcccacctcacctgagagccattgaatttgccttcctcatgaattaaaacctcccccaagcagagcttcctcagagaaagtggttctatgatgacgtcctgtcttggaaggactactactcaatggcccctgcactactctacttcctcttacctatgtcccttctcatgcctttccctccaacggggaaagccaactccatctctaagtgccgaactcatccctgttcctcaaggccacctggccaggagcttctctgatgtgatatccactttttttttttttgagatggagtctcactctgtcacccaggctggagtacagtgacacgacctcggctcactgcagcctccttctcctgggtccaagcaattattgtgcctcagcctcccgagtagctgagacttcaggtgcattccaccacacatggctaatttttgtatttttagtagaaatggggtttcgtcatgttggccaggctggtctcgaactcctggcctaggtgatccacccgcctcgacctcccaaagtgctgggattacaggcatgagccaccatgcccagtcgatatctcactttttattttgccatggatgagagtcctgggtgtgaggaacacctcccaccaggctagaggcaactgcccaggaaggactgtgcttccgtcacctctaaatcccttgcagatccttgataaa

SEQ ID NO: 1029 - DNA, 29 bp, Homo sapiens
tcatagtggttttgctgattgtagaagat

SEQ ID NO: 1030 - DNA, 4029 bp, Homo sapiens
acacatataagagagaattgttcagaatttaaaactgtaagcaaaaagatagttttttaaatttatatattgatagagaatgctatttactctgtttttgctaaaatctttgaagaacatcactggagttattgtctcctgagagaatgtttaccaccatcaactacctcaacctgtaattcttaaagaacaataataaattcaggaggcccagtcttccctgaccctgttggtactcaaggagacaatggcttcagaattcctccatgggttttgcatttcaggctcaagctaccttcttgatgaaaaattctggacgtgttctgaaaatcacagtcatccctaacttcagtggaaaagattcatattgtccagctgaacaaggattgatacttaaaaccagggatttcctaaaatgaaaatgtttctgtggataaaactgattacatgcagagactggaatggagttaattctgggtagatatgggattcaagagattggtcttcatgaggcatttatcaaggatctgcaagggatttagaggtgacggaagcacagtccttcctgggcagttgcctctagcctggtgggaggtgttcctcacacccaggactctcatccatggcaaaataaaaagtgagatatcgactgggcatggtggctcatgcctgtaatcccagcactttgggaggtcgaggcgggtggatcacctaggccaggagttcgagaccagcctggccaacatgacgaaaccccatttctactaaaaatacaaaaattagccatgtgtggtggaatgcacctgaagtctcagctactcgggaggctgaggcacaataattgcttggacccaggagaaggaggctgcagtgagccgaggtcgtgtcactgtactccagcctgggtgacagagtgagactccatctcaaaaaaaaaaaaagtggatatcacatcagagaagctcctggccaggtggccttgaggaacagggatgagttcggcacttagagatggagttggctttccccgttggagggaaaggcatgagaagggacataggtaagaggaagtagagtagtgcaggggccattgagtagtagtccttccaagacaggacgtcatcatagaaccactttctctgaggaagctctgcttgggggaggttttaattcatgaggaaggcaaattcaatggctctcaggtgaggtgggaaacagacacctaccaacactccaaagagaacatgtacctctataaaagggcacagtctagtgaacaaagtccacagctctgggtttgatttctagcactgtcacttaatactgtgtgaccttagacattcacttaactctctcagcctcaggatacaatctgtaaaaacaggagaatgcttgttccctgtgccttataggattgatatgagcatcaggagagacagtgggcacaaaatagcactgtcaactacttctttctagtcagttatctggtcatgtttgtgaagctccccaggactgggaacatagcatatgatttttttaaagttactcgatgaatgaatgaataaatgaatgagtaaatgaatgaataatatctaaaggcctccaactaaataataatcaacttcctaaccgtactgaaagcctttaattgactttggggctgtttggcctggaggaggctctgagttagtggtgatcagttggtgtcatggtagagaagaaagcctgtgaaggtggagtcattgtcattatcagcatagagtccattacgctctccttccccatacacctggagccagacttggtcgcccacctccagatgcaggagcacagagccggaggcctggtccacattattttcctggtactgatcataggtgaagagcatagccttgtccttcttgaagaggctgaccttcacatccttcatatagactgtgatgtggtaggcaaagtagtacagcccaggaatgttgcagtggaatttaccagtggagccatcatagtggttttgctgattgtagaagatcttggtaaagcgaatgggcatgttggggatagtaacgtaagtctccaatcccacactgaatgctgagcggtatacataggcaccttctccaggttctcctttcctgccttggattcccggaaagcctcggggaccttcagccccgggtactccggtttcaccgatgtctcccttaggaccaataagacctaaggaatgagaagacctcagtgactacaaagaacagaactcctgcctaggttggttacagcctaaattaccatccctgtggctcccactcacaaccttcttgacttatagatcaagaaaccaataagagctcccaaaaggagagaggtgttacctcctccttctatatctcccacagacatggaggctcccataatttcaactctatctttatctcctataggtctctatcatagaccctccaccctgccagccctttatgtgctggcaccatcaaccctggttttgcaattctaccccctccatctaggatgtctctcctcctctattctgcctacccatcattcaaggcctagctgaagctctgcctcctccttgaagccttcattcttcatcaggtccacggtgagtatattttctctatgctccatactttgaatacttgttcacattcagtttgacatttttagagtagactttcttgtagtaaccaccaacagagccttgcacattagacatcttacctagatcaagagttccccaaaggcaggactgagcctttcagggggtgtgcagtaaatgtggttgaatgccactgggtgaaatggaagttaagcagacagaaagaggaatcagaatatgaatgtactgggaatagggatgagggtgaagatgggaaaggggatggaaaaggagctgcagatgcagcaaagccaaagtcttggttatagaggcaccatctacactcatccttggaagaccaaccccaaatcacttcaggttgcttatggttaacataaaaaagctttgctttctccctgtgtctaggccttagttaataatgaatgccttcatatagtttatatcagtgtaggaggtctgtgatgaaagaggccagaaacattcttacctggatctcctttctcacccttctcaccaggggtgccatctctgccatcacggcctggggccccattatggcccggatgccctgggatgcccgccatccaacctgtgcaggcccccttgggcaggggaagcaggactccgggcccttgagtcgtggtttcctggtcatgaccgggcagagctaatagcagtagaacagctcccagcaacagcatcctgagccctggaatccacatgtgcactgtcagccatggagagacagaccccacacacacacccagttgggacctacaaaggactccgtccatctcagcagagtctacttctaggagctgctttctaagtattcaacttttccaggaagacttttctgaatattgcagcccaccttgatctctttctgccctgaaatctgtaatacttagcattattccctgtgtgtagtctcctttcctcaccaagattatgaattcagtgattgcacagatgacactcctctaattttcccatgtctgagcacaggaccaagcacagggaaagctccaagagtcgacttgccaagaatccatccttgggtttcccaagtacgatgacacagattgctccattcaatgctaaccagcttctctcctctggctcctttcttctttttctttccccccttctctctcattttctgtgtctattcctccttcttactctctcattctctttcttcctctacccctctcctggggcacatgtttgactattgggtatattacatttgcacacatgcacacacacaaacacacacagagaaaaagagagagagagggagggagagactcaccttgtgttaagcagacaacgagagacacatcatcccatgaacatatcccctggccctttgtttgcctgag

SEQ ID NO: 1031 - DNA, 99925 bp, Homo sapiens
caagcgtagtggtgtgctcctataatcccacctactcgggaggctgaggcagaagaatcgcttgaaccttggaggcagaggttgcagtgagacgagactgcgccattgcactccaatctgggcgacagagtgagactctgtctcaaatcaaacaaacaaacaaaaaacaaacaaacaagaaaattgggtcgaaaatctttagagaaacctccccaaagaagatagacagatggcaaataagcatatcagacgatgctccatatcatacattatcagggaaatgcaaattaaagcaacaatgagacgccagtacacacctactagaatggccaaaatccagaacactgataacaccaaatgctggtgaggatgtggagcaatggaaactcattccttgctggtgggagagcaaaatggtatagccaccctaaaagacagtttggtggtttcttataaaactaaacatacacttgccagatgatccagcaatcacactccttggtatttacccaaaggagttgataagttatgtccacacaaaaacctgcacatggatgtttatagcagctttattcataattgctcaaacttgggagtaatcaagatgcctttcagtaggtgaatggataaataaacggtggtatatccagttgatggaatatcattcagtgctaaaaagaaatgagctctcaagccatgaaaaaacattgaaagaagcttaaatgcatattacaaagtgaaagaaggcaatctgaagaggctacagactgtaggatttcaactctatgacattctggaaaagataaaactatggaaacagggagaatatgggaattctctgtaccttcctctcaattttgctgtgaacctaatagtgctctaaaatataaagtctttaaaaagaaatctggccttccctctccctcaccctgcaggggcaggtcctgttgcctgcctgtcccaggatccaggctcagctggtttctggctgggtttgaccataggagacccgagccggagactagagggaagaagaagtggggggagcagctcggcggcagctgcagctcctaccaaaaggcccctgtggttctaggccttctctctgtggccccccaacctcgggtgggctgtgctgatcccctatcaacctccaagtagtcctgggtaccctttccctggtatttagtgccctaagtcgaagtggtttctgttttcctggggcgactctaaactgatgaaatagtcacttggagactgatatgatttggatatgtgtccccacccaaatctcatgttgaattgtaatccccactgttggaggtggggccaagtgggaggtgattggttcacgggggtgggtttctcatgaatgatttagcaccatcctcttggtgctatccccacaatagtgagtgaattctcaccagatctggttgtttaagagtgtgtggcaccctggagccccagctactcaggaggctgaggcaggagaatcacttgaacccgggaggcataggttgcagtgagccgagatagcaccatccactgcactccagcctgggcaacagagtgaaactccgtctcaaaaagaaaaaaaaaaaaaagtaaccccgacaatgtaaaattaaagtgtagctgatgcaaaatggtcaaagataactttactagtgaaagctaatggaacaagagatttaaatgtattatttaaacatacaaagaactaaagataacagtggatggtgttacatacatggtcatatatcaggtgtgggggtccccaataccacctgcaggaacacccaggcctgctggagttaactcttgctacacagaaagaggagagaaatgtgtcccatccagcaacaaaaacctatccttccatgttttgtgtataggttgacgctaaaacctgaaaagcaaaaacaaaaattcacattagaaagtctatgtaaatattttcagtgccaggtcaagaagaggaatgctaggattatatttctttcttatacgtctaattcgatagtccctgagtcatttgaaaagagaactttcctagcacccaggtcccaatgattctcttcttaccatgaattaggaaaattatgatctattttactttacttctggcttttttcttttttctttattttatttttattttttgaaatggagcctcgctctatcacccaggctggagtgcagtggtgcaatctcggctcactgcaacctccacctcccaggttcaagcaattcttgtgcctcagcctcttgagtagctgggatcacaggtgtgcaccaccacacccagctaatttttatatttttagtagggacatgttggtttcgccatgttggccaggctggtcttgaactcctggcctcaagtgatctgcccacctcggacccccaaagtgctgggattacagacttgagccactgtgcccggcctgcttcttgttttgatcataactttctttttttttttttttttttttgagatggagtctcactctgtcgcccaggctggagtgcagtggcgctatctcggctcactgcaacctccgcctcccgggttcacgccattctcctgcctcagcccccgagtagctgggactacaggcacccgccaccacgcccggctaaatgtttgtattttttagtagagatgggatttcactgcattagccaggatggtctcgatctcctgaactcgtgatccgcccgccttggcctcccaaagtactgggattacaggcgtgagccacggctccttgcggatcataactttcttgtatagttctttccttctggtatttttaattgcttttccttattttcttgtactatttgccatcatcgtatccaacttcagactcccaatcacaccatctaatatgttgaattcacatatacacaattttttttttttttttttttgagacggagtctcactctgtcgcccaggctggagtgcagtggcgcaagctcggctcaccgcaacctctgcctcccaggttcaagcgattctcctgcctcagcctcctgagtagctgggattacaggcacccgccaccatgcccggctaatttttgtattcttagtagagacggggtttcgccacgttggccaggctggtctcgagctcctgacttcaggtgatccacccgcctcagtctcccaaagtgctgggattacaggcgtgagccaccacacccggctatacatatatatttaattcttggagtcctctctcccagagcctaccattctcctactccaacctggactgattgccaaccaggctttctgcccagttggcatccctggtatttcccatcacagctctcctggattagatccattgtcttatggatcccacattttcctttttcttggcttgcacccttgatttgctgcagagcatccccaagtagcttcctaagaaagtacatttcagaggcaaattttcttagctcttgtgtatctaaaaacatttttattccattatcacacataatggatattttggatggtgtacttctatgtggaaaatcattttcccttggaatttggaaagcattgccctattatctttttcttttcttgttgtcctgtgatcttttatcattcagtgttgttatgaactctggtgctactctgattcctgttcctttttctttatttcatttttccataattcttgttagttgcttgccagacttcctagatcactcctcaaagtcctcatattttctctcatatctttgtctctattgttttgttctattttctgggagacttcttcagttttattttccaatatttctattgaaatttgaatttcaataattccttcttgttctctgattgctctttttacataatattctgttcttgttttatgaatacagcattttcttttagttctgtagatatgttaattaaattaaattttttgatacattccctgaattttcttgaattccaagtttatattttttctacaggtttatcttgactctttttcctgttgaaggctttcatcaaatttctgataatatttactgactggtttatatttaataaggaaggactggataagtattgtggatttaatctgctgttgggcaaataggtctgttttcctgctgtgactcttctctgtgtaggacagggaggtgacgaacagagtatcccctagatgccggaatgaggaaacaattgttcaggggttgtcagcatccatgctggaagccttagctctccaccgacatttcaatcaatttctttacagaactgtcaggtgttttccctgtaggtctgtgccagctcccagctcagctgtctggtggggagaggaggttccaactggtacagtcattctgtactggtgccttcaattaatccccatgtgttcagtcctatttaattctatcgttttctaccacatgcctactgattctgattgtctggtgttatatctagcaaactcactcccacttcttctgtggctcccttgtcaaatattctcacctggatttttactgcctattttattcatcaatcaattcccatatgctttctataaagttgttgtcctttgatgataacctctcatcctcaccacattctcttcactctggtgggtttattcctttccttttttttttttttttcagacggagtcttgctctgtcacccaggctggagtgcaatggcacgatctcggctcactgcaacctctgcctcctgggttcaagcgattctcctgcctcggcctcccaagtagctgggattacaggtgcgtgccaccaggcctggctaattgtttgtatttttagcagaggcagggtttcaccatgttggccaagctggtctcgaactcctgacctcaagcaattcaccctccttggcttcccaaagtgctgggattacaggcatgagccaccacaccctgcctcctttctgtttcttgacattcttcttttagtgcacttctatgagtaaagaaggaaaactgtgtgtgtgtgtgtgtgtctgtgtctgtgtgtctgtgtgtgtgtctgtgtgtatgtgtgtctgtgtgtctgtgtatgtgactgtgtgtgtgtgtctgtgtgtctgggtgtgtgtgtgttcatgcacatctgtgcctgctcatggtgtcttatatcagaatttattcatttcttatctattttctaacaaatatggttaaggctattaatttttctaggtgacctctgtagccttatctcctaggttttaatatgtagggctctcaatgttggtcatttcttttgtttttagagacaggggcttgctctttctcccaggctggagtgcagtggcatgatcccacctcagcctgttgagtagctaggactacaggtgcgcacgtgcccagctaatttatttcatttttgggaaaaacggggtctcactttgttgcccaggctgatctcgaactcctgggctcaagcgatcctcctgccttggcctcccaaagtgctgggattacaggcatgagccagcgcccctggcctggattagctcttctgaaatatatatattctctatcagtttaagagatttttagacaaatggagtaaaagtttgtgttgtttgtcatattgataaaatccttctggttgtgggctttctgtcaattaccatctatactagattttcctggtttttatcttctacagtcctgtttttaagaggaccttaaactattacagtcccattttttaaattactgatttttaattctaatagtaaataattttgattatagtatatttttcttttttttcttttttttgagatggagtcttgctctgttacccgggctggagtgcagtggcacgatctcggctcactgcaagctccgcctcctgggttcaccccattctcctgcctcatcctcccaagtagctgggactacaggcgcccaccaccacacccggctaattttttgtatttttagtagagacggggtttcaccttgttagccagaatggtctcgatctcctgacctcgtgatctgcccgcctcggcctctcaaagtgctgggattacagacgtgagccaccatgcccagccgattatagtatatttttctacttttcaatggcaagtgtgaaactgtataacttaagttccttctattcaacctaaggaatttagcaagattctcttcattattttttaatatttcaaaaacttcttgagttctagtcttgtacattattctttccaatctagatttaagttgttatagcccatgaaacttcttgacttttgattgagcaaagaatttccagagttattgatgaagaattaacatttctataatgttaatgcttcccctccaggaatacggtagcgtctgtttttgtttttgttttcttcaggtcttcttttagatttttcagtaaagttttatagctttttgatgcaggttttgacatttcttattaagtttattcccagctgttttataatttttgtagtgagagtgagttgaatcttttttccctcattacattttccagctttttattactggtcgtgtttacatgcctgcatcctaacaccggggaactgacttgaaatgggcctttctccccgcagagacgcaccaagaatgaggtttaaaagagaatggaagaaggatgtatgtggggctttttatttttgttttttaattgacacatatttagggagtacaatttgatatttcaatatatatttatgttgcacaatggtccaagcagggtagttaatatatccatcagctcatgcatgtaccatttctttgttgtgggaactttcaaaagtctctcttctaggtattttgtaacatacaatatattgctgtcaaccatagtcaccctgctgtgcaatagaacaacataatttttttttttgagacagaatctcgctgtgtcacccaggctggagtgcagtggtgtgatctcagctcaccaggttgctctgcctcctgggttcgagcgattctcctgcctcagcctcccaagcagctgggactataggcacccgccgccatgcccagctaatttttgtatttttagtagaaatggggtttcaccatgttggccaggctgcactcaagctcctgacctcaagtgagtcacccacctcagtctcccaaagtgctgggattacaagcgtgagccactgcacctggtcaaaacaccagaatttattcatcttatctaataataactttgtacctgttgaccaacctctgcccatcctcctctccccgatcctctccccagtctctggtaactactgttctactctctgcttctatgatatcaactcttttttgtttttgagattccacatatgactgagatcatgtggtatttgtctttctgtttctggtttatttcccttaactttatgtcctccaggttcattcatgttgtcttaagtgacaggatttcattcttttttatggccgaatattattccattgcatatatgtaccacattttctttatccattcacctgttggtggacacctaagttgattctgtatctggctattgtgaatagtcattcaataaaaatgggagtgcagataactcttccacatactgatttcatttcctttggatatataccggtagtaggattgctggtagttctattttcaatttattgagaaacctccatactgttctccatagttgactatactaacttactaccccaccaacagtatgaaagtattcccttttctccacatctttgccaacttgtcttcttttgtctttttgattaaagccattctaactgaattgaaggggtatctcattgggcttttgatttgaatttccctgatgatgagtgatgttgaactttttttcccctccctccctccctcccttccttctctttcttttttcgagacagggtctcactctgtcacccaggccaaagtgcaatggcacgatcctggctcattgcagcctcaaactcctgggctcaagtgatcctcccaccccagcctcccaagaagctgagatgacaagtgtgcacaaccatgcctggctaattttttgtttttttagagacagtggtcttgccatgttaaccaggctggccttgaactcctggactcaagtgatcttcccacctcggcctaccaaagtgctgggattacaggtgtgagccaaggtgcctggcgagatttttcccatatacctgttggtcatttaaatgttttcttttgagaaatgtctattcaggttttttgccctctcctaaccttttattttatctatctatctatctgtctgtctgtctgtctgtctatctatctatctatctgtctatccatccatccatccatccatccatccatctatttcgagatggagtctcgctctgtcacccaggctgtagtgcaatggcacgatctcggcttactgcaacctccacctcccaggttcaagcgattctcctgcctcagcctccagagtagctgggactacaggtgcgtgccaccacgcccggctaatttttttttgtatttttagtagagatggggtttcaccattttagccaggatcatctcaatcccctgatctcgtgatccgcctgcctcggcctcccaaagtgctgagattacaggcgtgagccgtcgtgcctggtcacctttttttttttttttttttttttaaagacagggtcttgctttgttgcccaggctagagtgcaatgtgcaatcatagctcactgcagcctcaaactcctgggctcaagtgatccttccacctcagctttccagggagctgggactacaggtgtgtgccaccacgtctgtctaatttttaaattttttttgtaaagacggggtcttgcttcttgctatgttgcccaggcttgtcttgaactccagttctctgatttttaaaaaaaatcataagtagatgttgaattttatcaaatgctttttctgcatctattgaaataattatgtagtgtttttccccttaagtttgttaaggttgggtttctaattttaaaccatatttgcattcttaggataaaactcaactcggttgtgatagatcatatactgcaggattcagtttatttgtctagaattttaaaacttatttccacatcttgtgtcatacttttcttggctcatcatagtagatatattagtctagtaaaataagtttggagacatttatttcttttctgtgtatgattggaattgcctactcattaaagatttggtagaagtcatccataaagccctcttggtctgtttctctctctctctctctctctctctctctgtgtgcgtgtgtgtctgtgtgtgtctgcgtgtctgtgtctgtgtgtaggaggatgggtagctttttaaatacatagtcaatttcattgtggttacagggattttctgtttctaaagtcggttttggtaagctgtactttcctaggaatgtattccttttgcttatgttttcaaatttactgacacacagtgcataataaaaccttttcatgagtaacataatttacttttctcttttctctttatatccagcttgttagagggttggcttttgtttttcagcttttcaaagaagcaggtttaaaattttctcaatcctctccatcatttgtttctatttcattaagttttattcatccttatttttctttcttctacttttgcaggcttactctgtcatttctttatggcttcttgaattggatgttcagcgtgatgacttttggactgctttagccgcatctctatacttcagcatcgcacacccaatggcttactcaacatctccactttcacaccactgggcaccccaagcttaatacagccaaagcagaactcttgatctgcacctctgaaaatgtacttttcctgtagttctccccactatggtgaaaagcacccttatttccccagttgctcaggccccaatctcaggaatcatccttgtttcttcccttgctctatgccctacatccaatccttttgttcagttctgaaaacatatcttgaatctcacaacttctcagagctgcactgctgccaccctagttaaagctaccatcaactctttctcctagactgttccagggccttgcaactagccttgtgctgtagttttgtttcatcacgtccagttctccactctacacctgcaacatagatcagacagctcctggctcaaaatcctctgagggcttctcatcttagaataaactctcggttctggccgggtgcggtggcttacgcctgtagtcccagcactttgggagtccgaggcgggcggatcacttgaactcaggagtttgagaccagcctgggcaacatggtgaactcccatctctatcaaaaatacaaaaacttagccaggcgtggtggttcgcatctgtggtcccagctacttaggacgctgaggagggaggatcgcttgagctcagggtggacgttgcagtgagccaagattgcgccactgcactgcagcctgggtgacagaatgagaccccatccccaccccccccaaaaaagaatgaactcccagttctcatagtggccccagctgcctttccaatcacattccctaccactctccagcaacactgacttcctcgttagtccccaacatgccaggcatagtctctcctcatgtcctttgaacttgcctggaatgttctttccccagatattcatatgagggagtaaaatgagggtgaaaaccagcagatatctaaatagcacccccttcacttagtttatctttctcaaagcccttatcactatgtgaaatgatatattatacttatttgtatgctagtatgaatcttcccggcaagaatgttagtttgctgtctgttcagtaccgtgcatccagagcctggaagagtgcctggcacatagcaggtagtcaataaatgaatgggggcaagcagccaaatcagaatcaggttttcttgctaagcatagaactaacagaaggatcattgaatggattggataatgactggcatcagggtaaggtccccttaacaaacactcctgtcctgaacacctggttagctaacagttttctcatactcttattttcccaaaacacaattgctggatctcagctccaaatcaactcttctaggaaagtgaaaaattgctggatctcagctcccaaatcatatcttccaggcagagctaacattgccccttattcacacctccaccaaaccatctgatccaacagtgacaggtgtcacgaggccttggcatgcactctcttcccccgccagagttctgcgaaagccagggttgcgatttgttgtcagtttattccccgcctctatgagagtgtgagcactgggcaggctcggatgaaataatgcattgagtaggcctctgaaaccaaggcccctcagctggggcaacgtcaggctccagggtgggcaactttgctgcttctgccgaagatagtgatattgagaaaatgtgggtgcaatgaaacgcttattgcagcgcactcggtgcatctgtggacagagggtcaatcgcccctcagagcagcgcaaacaggcgtcccaagcctaggccttcacttgccccagcatccgcaagggtccattaatccttaacattcaaattccgcccactaaaccagtccctccgcgcccaagccgcctcttttccccaaacgacggccgaaagcagccaatcaacagctggaggggtccgcccccttttccctggccgaaatggacaggaaatctcgccaattgacggcatcgccgctgagacctcccccctcccccgtcctccccgtcccagcccggccatcacagccaatgacgggcgggctcgcagcggcgccgagggcggggcgcgggcgcgcaggtgcagcagcgcgcgggccggccaagagggcggggcgcgacgtcggccgtgcggggtcccggcgtcggcggcgcgcgcgctccctcctctcggagagagggctgtggtaaaagccgtccggaaaatggccgccgccgccgccgccgcgccgagcggaggaggaggaggaggcgaggaggagagactgtgagtgggaccgccgtggccgcgggcggggacccttgccggggggcgggggtcaggggcgggacgtggcgcgggaggggcccgcggggtcggacgacacggctggcggatggcgtccctcctctctaccctccccctcccgccgccgccggtggcgactctcccctcggcccgtcacccgtgctcgcgggtgaccgtcctcggcgcggcctccctggagccgccttcgcctgacgcccctcttcctcccgccctcgacgcgcatcccggcccccggccccgcgggcgcccctgtcgccggggttcgcctgtcggggctgcgcgcgctcctgcccttctcggggctttgggccgcggcgccgtcgcgcgcccgcggccccggcctctccctggatcgcgctctccccctccctccctcgcgcgccccctctcccgttactcggcccccccaccggcgcgcgtgcgcacttcgcctcccgtcgggagagtgcgccacaagggctcctgagctctcacccccatctctgggctttgcctccccctccttctcgcccattccatgaatttctgccccccgctacccccccgcgagcgagtaggtccaccggctcctttccccatctagcaggaacaagtaggtggggattattatccacaaaagggactagacattgtgttctgggtcccacaactcatcataaagaggtggttatagttcccatcaggagccgtgggtaggggactgtgcgtccagcagcacccgaggctcttcggcgccagaggctctaaggtgcgagcgtgtccccagggtgctcagaggttctttggagtgctgtggcctcggaatgtgagcaccctcccatcctaccctccccttcgccggcgatcttccagttacataagtggagtgggacatagtaggtaacgggctctcatcgccctggagcgctcgggatcaccggtaccagatggggcaagttcatcgcgacgctgtggctcctgttaattgtgcctgaaaggttatcctctgttcagtttggtcatgaccgaatcacccaaactgaaactcagatgacttttatatggcagtggcaatgtttctgtggttttgcactaaagacttaaggtcattatgaagagtgtaaaaggattgctgtcgcaggggagaccgtttatgacattgctaagtatggaccccgagggggaaaaagctcattctggaattgctctgtggcggttgcttctgttgcgagtgtgttcgggtgtgggttggtcacagcagaaatgggctccaccacaaaattgatattcctgactcatggtcaggcagatgtgtgcttctggttatttttccaggaacaggaatgggctctgccgagcctttcacacgttgtgtctctgctgtgcgggatcagtaccccagactgtgagataacaggatcgaattcaggggttggttggtgatccaggaaccatacctacttggatgtgatactgagtggcctagacgttgtaggactctcataagttttagacattttgttatactgtaaaaatgaagcatatacggcctcagtagtaacattgcactaataggtaattattactctagagaattttgggttccatggctggaatgttcatcagtatctcagcaatttcagttaataaccagattaagctgacctcttgagtcttttgaaatctgctgggtccctataataagacagggtctggattttttaatcttttgggaatttccaccaaggatttagggaaataggcttttatgggcttttcaggatttctatttcaaatcccaatgaggaagtctaggaaacacttgcttttattttcttgcctgaatatgtcagaaccttaaatcacccaatcaatctagaagtactacagttgattaaagtaagtcaccacaggtcacccattcgtggcaggtcagctaggtggctgatcactggaatacagtcatatccccaggcatacacacgagcctcacttgacgatcccaaagtttgtacatctgagcttgagacgtgacaagttgaggtctctgctttgttcttcatagttggcagtttgtctcctcgggtgcccctccggttagctgtttatcatacgtctagccctatcaacagtgcaggcagcttccagagtatagttttctctgcaaagtgcctggtggaggggtacctccttttccattgtcctaatggctccactgggcttccataccagccctttccagtgtcttaacagctcaaagaaacccatctgtggctttcttgttagcactggcctatcacaccttcctattgcctgttaactaaaattttgcctggaatgctttaagcttagagtactgggtctttgtttcacccgattgataggagagtgtcatgcagtcagccgaactccgacttctgtgctgtttaaatccttaggtaggtctggggcaaggcacaaaccactgtgtattcaaagggttatggtgcttgcattctgtgtgtatatgtttgtaatttccaaccagagtcgtttcccgtgcctgccctgcctctgtgcaatctagtctagtagggtagggaggcaagctgtggagtttgaaaaaaaaaaaaaaagctagatgagtttaataggctgttaccccctccagaacattcctcccatgtggagatgaaacgagaagttcatttctttaacctaaaataaagaacaacagagataaaattgttagttccttattggagcctggtttccattgctaatgtacctgcttgggactctgcatgataaatgacgtgtcctggaacctgaaatcttttataaaggttaatatcagcagaaatcttttaattagctaagagcagcttgttctcaagctgcccgagttatcttggaggagagaatcacaggaaatgtttgatatttctagtaaccagtgttttcagtgcgtggggtaaagcacactcctagactggccagtcccaaagagtgtggcaggacacctgcttgttttccctgccctctgctatggtgacatccttgcagaccagtcttgcgtggctggcagacgcaatctttttttcttgggtagagcattatcaccgctgcgatggaaggaccttgtcctcggtgcctccataccagccctttccagtgaaactactgctgtcccggcaagcccctgtgcgtgtgcatcattccgggtaggacaagatgtgaacaggtccctcttctttgggcttaagtagaagttgtgctcttctgcttttacctgtgtgctcttctgcttttacctgttctcttctgcctttctcttgcaagaaacctgtcgaaagcttgctttgcatgccattgcttaaatactttgatggtatgtatggtatgtgggataactgagtgggagccggaattggggggtgggcagggcatccccacccccacccccacatcaaagggggaatgaccatttcgttagagaataaagcctgagtcttataacttcttcaagcacatgtatgctgggtctcctggcgtgtgaatgtgttcccgctgtgctgtgtggctgttttgcagttactgtagacactgtagtctgggctctcattattgcctctgaagttgacaggaccaagccttagtaaggatgcacttgtcttcctagcccaagagctaggggtgttttatatatatattaactttcttttttagatttcataaactgctctcattttctcttttctttctttctttttttttttttttttttgagacagtctcactctgtcacccatgctggagtgcagtggcacgatctcagctcactgcaacctctgcctcccgggctcaagcagttctctgcctcagcctcccaagtagctgggattacaggcacctgccaccacgcctggctaatttttgtattttttttttttttttttttttttttttagtcgagacggggtttcaccatcttggccacgctggtcttgaactcctgacctcgtgatccacccgcttcagcctcccaaagtgcagggattacaggcgtgagccaccgcacccagcctctggctcttttctttttgacatgaaatcttaagttaattatcttaaactttaagaactagaaggattcttagtccagcaccatcagtttacaaacaaaaaaaacttgtgtccctgagaagttgtgacttttccagggcctcctagccaggataccagtttggtttttattatatagctagccgagtaatactattaacttgacttctgggatttcaaagtattctatgacttgactgtttaagggaattatgaggcctcactgaacctcaaaagataattttaggtaccatcctggtagctgtagagcagcaacagaccagtaaaagacttggttggtgttgcccttcttctgggtttgattacatgagtaattgtgtgaatagtctctaagttgtatgctctgagctttcgtttttagcttataaaagtgctactcttgggccagcatagtatcagaaattagctaattcatatggggcagtttaggctttaactaggaaatgatggttatcttaatgacaaaaaaggtactgacaaaagtccttttttgaacatgtgttcaaaagaaaaagagaaactatcaaactaataactgagtttgttgaacatcgagattgactgatctgagaggcttaaaactgattgccctgaaatagacttgcatgttttggatgatggctttgggtctcccagagcacttggtttcccttggtgctgattttttctctcaggattaaagcccctttatgtgatgttgttacagcagcttattgcaacttcattcagctgcttgaaaaagaagggagactgcctctaggttccatgtgttctttcagggatggtattttgatgttgcgtattctcttgaacatgtattcttccctgagaatttctgtgtgccgtggtagaagaaatacttgccagaaatcgccactcatggtatgcttttgtagtgtcgaagtgtcccctagaggtgacaaggcttgtgatagtgttgattctaacaagcatgaatctttcctttattttagcactgtgtgttacgtgccagtaatttgcagcttatcctttgtttctagctaggtaagctgggaaatagcctagtactttgtctatgtgtttatcttcaaaatgtcccaaatagccctgggaaaaaggtcgtgcagctcaatgggggctttcaacttacaattttctttgttttaggctccataaaaatacagactcaccagttcctgctttgatgtgacatgtgactccccagaatacaccttgcttctgtagaccagctccaacaggattccatggtagctgggatgttagggctcaggtaagtaaccttcctttttttttttttagtatatgtcctggtttggccatctgttttttttttttttaaaaaaaaaaaaaaaaggaaaagaggaaaaaaatatactactcttggacagtataaaagtaccccaaagactaaagacataactgtgccaaactgtgccatataataaaaaaaagtcacttccctgagccctgaaaggtcagtgtgtgtagggttacttggtcgccacagcgtgatctgggggcgggcgtcagattagagccggaactggtgatctgcaacttcagttcaccttgaagcaggtcagctgagctgagagcgcttgcactgagcccttttgcgctgctgctgttgccttagcggtcttcagcatgtgtttgctttggtttggggtaaatggcttagtggtcaacattagtgagcagtggtaatgcattttcagatatgggaactggtatgtggttggttccctagaaggacaccctcctgaaagctgtctcagaacaccgggggccatggctaatgtcatgtgcttgctacactcctcccatggtaactaaagagagtacccagatatacatctggttcttgggactctagaggaggatgagtactttgtaaaaacctgggggccccagtcattctaggtctgacactcaggtgctgtatcagctgcagtttgaactacttggcaccattgtgtggactttagttttgtaaaaatgaatggttccttaatttctcaaccttcaggctcaacatctcaagctgtttgttgttgttgttgttgttgttgttttgttttgtctttttgattagtggtcactccgcatttgatgttttgacatgtggatttcagaacttctgtgtggtaaagcagaatgttccaattgaattttcccattttttttcccctaagcaaaaatgtgagttttcacttatgcggccattgtgattccgactgagaccctaagtcgttctttgttgtctctctagtggtttctgacacctcagtgtgaagctgttgtagacatccataagaaatagcctgcttagggattatgtgagggcaaggtttggctgaaggagaatagaaggtgtggaaggaagcggaagaccagaagagcatcacactgcctcaagtcccaaatttgattctgctcctgatcctgtgactcaaattgtcattctcttttactgctgtggggtgtgctctgggcccagctgacaggacattctttgtactccacgtatttatgctggtgggagttgtatggctagtgctttgtgctttgtctcagaaattgtgtggactaaatgtaatatgggcagtgaatgggtttcttctggaagatgttaggcctggagggtggtttgggtttttacgagtctttttctcagattacagattacgaatggatgttataaaacaggcagtgttgacaccatacagtttctcctaagaaatgtacagagagttcaacctgaggaagctaattgaaaataaacttttaaaaagaaatgtagaaagaggaaatttaaaaagtatcttatgaatgggaaagatgtagccatttgagcttcaaagaacttttgagggaattctcaaaggacagtacccgtctttagtagataaatgcttgatatctatttttcttcttttactttttaaagaattactaaaataatacatggatttatagaaaaatcaaaccacttaaaaattgatcaggtggctgggcaaggtggctcatgcctgtaatcacagcgctttgggaggcctaggcgggtggatcacctgaagtcaggagttcgagaccagcctggctaacacggcgaaaccccatctctattaaaaatacaaaaattagctggccatggtggcttgagcgtgtagtcccagctactcggaaggctgaggcaggagaatcacttgaacctgggaggcggaggttgcagtgagccaagatcacaccactgcactcctgcctgggtgacagagtgagactcggtctcaaaaaaaaaaaaaaaaaaaagtatcaggtaaaaaaatgaaagctccccgcttaatctctgctcccactacccagaataactgctgttaatagcttaatgtagatccttctaagtcttctaagactaaactgtgtactttttgtgttgtaattaacaggagggtttttgttttgttttgttttttctttttttgagatggagtcttgctctgtcatccaggctggagtacagtggcacaatcttggctcactgcaacctccacctcctgggttcaagtgattctcctgcctcagcctcctgagtagctgggattacaggcgcctgccaccacacccagctaatttttgtatttttagtagagatgggtttcaccatgttggccaggctggtgtcgaactcctgacctcaggcgatccacctgccttggcctcccaaagtgctgggattacaggcgtgagccaccgtgcctggcctcaggatggtgttatatatacatattctgcatttttccatctcatatattcatctctgcctcatttcttttaaatagcagtgtagtccagggctgacttaccgtcatgcatttcgttgtctctctatgttattaaaaatgctacaggattgaaattcctcatgtgccagtcattttgaagaatggctgcctagacttggaatttctggtggataccaccacatcactgtccaaaatggctatcccagttcccacaacagtctgagaaagtgccattttcccatatcgtcccagaattggatatacatcttttaaattggtgccgcttggattattactgaggctaaacctcaataatcattgtcatagctcttaatgtattaaagatgttaactctttgtcatgcagatattttcctgttttgtcttacgtcttgattcttgtctttctgatatataaaatttatgttatgatttattcttttgctttcatacttaggaaatccttttttactctttttttttttttttttttttttttttgagacggagtctcgctctgtcgcccaggttggagtgcaatggcgtgatcttggctcactgcaagctccatctcccgggttcattccattctcctgcctcagcctcccgagtagctgggactacaggcgcccgccaccacgcctggctaatttttttgtatttttagtagagacagggtttcaccatgttagccaggctggtctcgatctcctgaccttgtgatccgcccgtctctgcctcccaaagtgctgggattacaggcgtgagccaccgcgccccgccaggaaatcctttcctactcttaacaacagatcaatagtcatctatattttcttcctaaaaaacctgatgatgtattatattcatacatacgtatttaatacatacaaaagggccagatgcggtggctcatgcctgtaatcccagcactttgggaggctgaggcgggtggatcacctgaggtcaagagttcaagaccagcctggccaagatggtgaaatcccgtctctactaaaaatacaaaaattagccaggcgtggtggcgggcacctgtaatctcaactactggggtgactgaggcaggagaatcgcttgaacccaggaggcagaagtttcggtgagccaagatcacgccactgcactcctgcctgggcgatagagtgaggctctgtctcaaaaataaaaaataaaaataataattttatagttaagttgccctgtgtttttcctgtgattaaaaaaaaaaatacctgttttgtatttaactttggggtgggataaggtatagcccacttagtcagttgtgtctaagccacttgatgaaccagtcaatccagtcttcacctttaacaaatgctgatttcttcaagtgagcaaaatatctcttaaactttttcctattttctctataaagttgcttttttctgaattttttctttatgaggcttgatgggcagccctatcagcagacaatcattcattcacccaacaaatatttgagtatctgcttcaagccaggggcagtgctaagccctggaagtggtatcttctccttatccgggagtggggctacagtgttcattccagaagactcaagaaaatagcagatcatcacaaaagtaggttttacataaatgaggaggaatccacagggttgtgtatatgtgtgtgtattttaaattctgacataagttggagctttagggtagactgtgacataagagtagtttgttttccaactcatgtaattgccggctgatttttgtcttgaattatgataatggtaacttctgttgaaacaattctgtattcatcttagcttggttgggatgcaataaaagttttgtactggtaaaaatgataattttcttccatgatgattttgaagcttttctgtaacacctgataaaaatagaggggccaggcatggtggctcatgcctgtagtcccagctactcgggaggatgaggtgagaggatcccatgagcccaggagttttaggctacagtgagccatcatcacaccactgtactcctgtactctagcctgggcagcctcgttctttagagtaagacactgtctctttaaaaaaaaaaaaaaagaaaaaagaaaaaaagaaaaggcttttagtgaatatatttttagggtagcaagtgtaatttttataaattgcattatttgaatctaataaataccctcaaagctgaagtcgaattctgattttgattgaaaatattttttacttaaaggaagagggatagaataaatgacacgattaaggaaaagacttcttgtataaggccggggttttttaaatgattttttgaatagttagatggacaatacggaattaaaaaggtggtgtaaaaagttatacggggctgggcacagtgactcacgcctgcaatcccagtactttgggaggccgaggtgggtggatcacctgaggtcaggagttcgagaccagcctagccaacatgacgaaacatcatttctactaaaaatacaaaaattagctgggcttggtggtatgcacctgtaatccagctactcgggaggctgaggcagaagaatcgtttgaacccaggaggcagaggttgcagtgagccaagatcgtgccattgcactccagcctgggcgacagagtgagactccatctcagaaaaataataatagaaaaaagttatatggggctgggcatggtggctcatgcctgtaatcccagcagtttgggaggctgaggcagcttgatcacttgaggtcaggaattcgagactagcctggccaacatggtgaaactccgtctccactaaaaatacaaaaattagccaagcgtggtggtgcgtgcctgtagtcccagctacttgggaagctgaggcaggagaatcgcctgaacctgggaggcagaggttgcagtgagccaagatcatgccgttgcactccagcctggacgacaagagcggaactccgtctcaaaaaaaaaaaaaaaagagttatattgtaaagtatctctgctaccctgccccaaacattcatttctttccctggaggcagccactattacctgtttctttaaaaaaaaaaaaaaattgtggccgggcacggtggctcacgcctgtaatcctagcactttgggaggtggaggtgggtggatcatgaggtcaagagatcgagaccatcttggccaacatggtaaaaccccatctctactaaaaatacaaaaaattagccgggcatggtggcgggcacctgtagtcccagctactcgggaggctgaggcaggagaatcgcttgaacctgggaggcagaggttgcagtgaactgagatcacgccgctgcactccagcctggcaacagaatgagactccatctcaaaaaaaaaagcgtgtgtgtacccgtgtgttaaatttttattataaaatatatataacaggctgggcgtggtggctcacgcctgtaatcccagcactttgggaggccgaggcaggctgatcacgaggtcaggagatcgagaccatcctggcgagcacggtgaaacctcgtctttactaaaaatacaaaaaattagccgggcatggtggcgggcgcctgtagtcccagctactctgagagcctgaggcaggagaatggcgtgaacccaggaggcggagcttgcagtgagccgagatcgcgtcactgcactccagcctgggcgacagaccgagactccgtctcaaaaaatatatatcgatatatataacaatttacagttttaatcatcttaactgtacagttcagtggcactgagtacattcacattgttgtacagccattactaccatccatctctacaacctttcgtcttgcaaaactgaaatttcatacctattaaacactaactcccacttctcccctttcccccaccccaccctctggcaactactattctactctttgtctctattggacatatttttgtgtgtttaggtttgtgtatatattttacatgtgtgtataaatacacaagggtatgtgggcgttgtgtttttacacatactataaaatattgtgcacatttgtttattttaatgtatcctgtagattatttagaatcggttcatacagagccgtatcattccttttaagggttgggtttaaatagtctgttatggatgtaccacaatttatttaaccagtttttaaattttttacttattttttttaatgtttttttagagacaggatcccactccatcacccagactggagtgcaacagcatgatcatagcttactgcagccttgaactccggggctgatgtgatcctcccacctcaggctctcttgtagctgggactacagggatgtgccgccatgcctggctaaattttttatttttatttttatttttatttttggtagacacggggtttcactgtgttgcccaggctggtcttgaactccttgggcttgagtaatcctcctgccttggcctcccaaagtgccgagattacaaccatgagccatggagcccgacaagagtagccttttatttgcagaccattagagaaaaagttgcgtgtaagtagataagcatacgaatttatcactgcaatactgtttgtagagatcacagagctgttaggctaggaagaagtttttagcagttagcactagaaagcaaaactttggaaacttccatttcatcaaaagtgacctcatctgagtagggcatgtgagggaaggacctttttactcgacaaggggaacttgccagttcttgtttgtgaaccttgaagaaagtggagcatttttattttgggaccattctaggttgtggtagttccttggtactcggggttggagaatctccctctgctgctggaccttctgcctcctcatgctgtaatatgcataagaggtgtcctagaagtattcaggaacaggctgtggttgctttgttgttctgtgactgttgaactctttatatagcagtacttttttaagctgtactaattgagcatttattatgtgtcagttactgtgctagctgctggaaactatcctaccctcagcagtcttctggtctaatgggaggtacagacaggcaaatgggctatgactttacaagaggctaacttctgtgatggagagaagttccagccactaagggagcacataaaaatcagaggagatcctaccaagaattgggaggtaggtcagggaggagacttctttgaaaaatggcatctaagacctgaacagcaaggaaacattagctaggtcaaggacaaagcatcagtggggagagatgcatgagtcttttggaaggaccagcatgtgtagaggctctgacaggagagaatctctcaggcccattcagagagtccactgtgtgaagacgaggcatgaacaaccagccaggacatgtggagaggagcatttttctttttttcttttttctttcttttttttttttttttttttttgagacgtctttctctgtcacccaggctggagtgcaatggcatgatctcggctcactgcaacccccacttccagggttcaagcaattcttctgccttagcctcccaagcagctaggattacaggcacccgccaccatgcccggttaatttttgtatttttagtagagacggagtttcaccatgttggcctcaaactcctgaccttaggtgatccacccgtctcggcctcccagagtgctgggattacaggtgagagcccccacgcccggccaggctcggctttctttccaggccccgtcacactcttagatgttccctgggccccagaaggcagcgtgaggtgctctgcccatctatgctgtccttttccaccccaccctatccactgggcccctggggctcccactccactccaggtctcttcatggacccttctttcccttcacttctgtcccaggagacctgggagactcatgggaacaggcatcatcttctccagcacagttcattgtctaatgcacgaaagtgctgggctgtgagaaggtcaggagcttacatggaatgggagtcagctgtggtacaaagtacgctgcttagttctactgattttttattttttatttttacataagactttgatggtaaaggaagcagtgtgtgagcaagctgactcctgtcttgtcaagtaccaggtccactctgatgagcccctgtggacagcactgctgtaactccccaagcctgggctcaggaggtgggccctaagcgctgttcccagctcttcctccatgctgtcagctcttccaccattcttcctggcgtcattctaaggtcctgtcttcccccgccctcttccttcctggcttctacgctcagctcaagtagtagctgtttgggtacttttcacccagacttaggaaatgttatcagttggtcgtattcctgtcagccctcttactatggaactcaaataggacagattcagctgaattcccagccctgtggttgcactctttgtctgccctgcttccccaaggtagcctgctccctaaaggtcaccgagatactccccatgcaaggtttttgttgtattacacatgacaacatggaataaagtgttttgcaaatttactggatgatatcctactatgtggaacatcctacaacttactcttttcactcaacatttgacttttgaacctggtctgtattgctccgtgcagaccaatgttcattcatttgatatgtctccttgtgccatagaaatagttttacaatagaagcctgtccagagccatgagggagaaggggattgtagagaaacaaggattggcatctggtttatgtttacatcctttagtcctgttaaccgagaagaagatatttttatttccatgtttgcgaaagctttccacaaaaaaaagcatccattttctagacttattaatagggcagtccaaaggttttatttttagatttgaaagaaagcaaagtaggcttctgagatatgcacatttccctgtgtccctgtctcttttgcaacattccacattgctgctaaaacttgaacatgagcactttcaagcatgtgcttactttctatgtatgactcattttttaaaacattaaagcattttcggccgggtgtggtggctcacgcctatattcctagcactttagaaggccgaggcgggtagatcacttgaggtcaggagttcaagaccagcctagccaatatagtgaaaccccatctccactaaaaatacaaaaattagccgggcatggtggcgggcgcctgtaatcccagctactcgggaggctgaggcaggagaattgcttgaacccaggaggtggaggttgcagtgagcagagatcgagccactgcactctagcctaggtgacagagcgagactctgtctcaaaaaaataaaaataaagcattaaagcactttgtctggtggtatgtaagttttggcattacttagataagttgtattttaagtctttctacacacaataacttatttttaaaatacaagtttctgtgtacttccgggttttgtgtttttgtaaacagcagaaggtattagtccatattaagtactaatttgttctaatattttcagctgtttttggaattacacttggcaaaaaaatagacaaatgtctgcagttgtgacagtttgtttttttgttctttttaactccagaataaataattctagtgagtttttttcttggcttgtaagaacatgggaatgattagagtcatcataacacttaagtagttatagaaggttgaacatctgtagtcagttgtataaaatttcctagtcatccttccaggttgtttaagacaaacaaatacatagtatttattaagctcttataaattttaattgtaaaacatcattgtacaaaactttgaaaatgcgtataggtacaaagataaaaaattaggccaggcatgccatggctcacgcctgtaatcccagcactttgggaggccaaggtgggaggatcttttgagcccaggagttcaagaccagcctgagcaacatattgagaccctatctctacaaaaatatcataaaacaaaatagaatcactctggcgattccactatccaaaaaaaaaaaaaactgctgttaatatttggtatgtatctttctagaccaaggcctccaactttggttgagaattcagccgggtctgtgaccttggatgggaaaaacattcactctttattttcactaatgtctctgaaaacccagatttttagctgggcatggtggctcgtgcctgtaatcccagtgctttggaagcccgtggagggcagatcacttgagcccaggagtttgagaccagcctgggcaacatagcaagaccctgtcttttaaaaaaaaaaaaaatccagccgggtgtggtggctcatgcctgtaatcccagcactttgagaggctgaggcaggcagatcacctgaggtcaggagtttgagaccagcctgaccaacatggtgaaatcctgtctctactaaaaatacaaaaatcagccgggcatggtggtgggcgcctgtaatcccagctactccggaggctgaggcaggagaatcacttgaacccggaaggtagaggttgcagtgagccaagatcacaccattgcactccagcctgggcgacagagcgagactctgtctcaaaaaaaaaaaaaaaaatccacattttcttcaatgacaattgtaagcaacagatcatggtagtattagaatagcagtgactgtcaccagtagagatcaaagatactttcatatcatattatagttgttacagatattttgaaatatatatgtccatcactgcttcaaacttaaggtaattattagacccatctctagatctggttatttaatgatttactgaagaagcacatattatttgagaacgaactcttgaaatatgttgttaatttctgtgcattttacacatttcaaaacattcttctgaggaggggtccagaaggccaaaagggtccatggcagaaaaaggttaagaacacctgttctgtactttgtaccatgtggctacaaatataaaaacagacgttaagccgggtatggtgatgcacacctgtagttccacctacttgggaggctgaggtgggaaaatcacttgagcccaggagtttgaggccagcctgggcaacagagcaagaccccatctcttaaaaaccagtcagcacttgactagtcagttagtgggggaaaacacaggtacagtaaaaggagtcaaaattacacttaaacttaggtcatcttattatatcaaacatttattaacatgtttagtgttttgtgtatattatgcaaagtgtaatgcaactaaaactgtttaacacttctcgatatcacataaatttgttggtgcataatagcctaaaagttacttttgctgttggcattttattttattacttacttatttatttatttatttatttattttgagacagagtcacactgtcgccaggctggagtgcagtggtgcgatctcagctcactgcaacctctgcctccctggttcaagcgattctcccgcctcagcctcctgactagctgggactacaggtgcgcgccaccatgcccagctaatttttgtatttttagtagagatagggtttcgccatgttggccaggatggtcttcatctcttgaccttgtgatctgcccacctcggcctcccaaagtgctaggattacaggcatgagccaccacgctgggcctgctgttggcattttaaacatccttctagagtctttcttatttgcctgtaagcacgtacacatgttgttgttgttttgagacaaggtctgtcgcccaagctggagcacagtggtgcaatcacagctcactacagcttcgacctcttgggtgcaagtgatcctcccaatcagcctcccaagtaggtgggactacaggtgtccgctaccatgcccagctaatttttgtattttttttgtagagacggagtttcaccatgttgcccagactggtctcaaactcctttgctcaaacgatccttccgcctcggcctcccaaagtgccgggattacaagtgtgcacctctgtgcctggcccacatattgttttagatgaatgagatcatatatgtacttttgtaacttgctacctttcctcaacaaaatgttgtaaatatccatgtccataaaaatagacgtatatcttcacttttccctaaaatgaaaataacttaacttgcattttcttttttgtttttgtttttgttttgagacaggctcttgctctgttgctcaggctggagtgcagtgatgtcacagctcactacagcctccacctccagtttcaagtattccacctacctcagcctccaagatagctaagactacaggcacatgtcacgacgcctggctaatttttaaaatattttttgcagaaatgggatttcactatgttgcccaggctggcctcaaactgctggcctcaagtgatcttcctgccttggcctcccaaagtgctgggattacagtcgtgagccactgtgcccagcctgcattttcttattataaaagtaatacatgttcaatggacaaaaaattttcagaaaatatgcaaagatgaaaagtaaaaattgtccataaatctgtcatctacagataaagataacttctggataatgtttttctaccatcatttttagtaatcacataacatttcgttgtatgtctatgccttcatttaattaagaggcatttccattatttctgcatgttcatgactctgaatgatgatatgtctgcctgctgatggctacaaccctgtttctgcatttcaaacctctctcttgagctccagatttgatggcctcgtcagcatttacttgagttgctcataagtgtctcaaatttaacaagtcccagtcttgatttttttcccccttcaaacctattcctcatgttgtctctatttcagtaaacaatatcaacatccacccagttactcagtccaaaattctaggagtcatccttgattctgctctttctttttttttttttttttgagacggagtctcgctctgtcgcccaggccggactgcggactgcagtggcgcgatctcggctcactgcaagctccgcttcccgggttcacgccattctcctgcctcagcctcccgagtagctgggactacaggcgcccgccaccgcgcccggctaattttttgtatttttagtagagacggggtttcaccttgttagccaggatggtctcgatctcctgacctcatgatccacccgcctcggcctcccaaagtgctgggattacaggcgtgagccaccgcgcccggcctcttttttttttttgatacggagtctcattctcgtcatccaggctggagtgcagtggtgcaatcttggctcactgcaacctccgcctcccgggttcaagcaattcttctgccccaacctcctgagtagctgggcctggctaattttttgtatttttagtagagatggggtttcaccatgttggccaggctggtcctgaactcctgaccttgtgatccgcccacctcagcctcccaaagtgctgggattacaggcgtgagccactgcacccgccctgattctgctctttctctcatcatccctgatctgtcagcaagtcctgttaggccaaccacttctcagcatctgcactgccagtatgctagtccaagccacaaaacacctctcagaggtacgcaacaggactttgttgttgttgtgtgtgtgtgtgttttttttttttttacggtagaattattttataacttgaagtgtagggatgaccttccttttaaaattttatttattttcttaattttttattcccatagattttaggggaacaggtggtatttggtgacatgagtaagttctttaatggtgatttctgagattttggtgcacccatcacccgagcagtgtacactgaacccaatttgtagtcttttatccctcaccccctcccaccctttccctcaagtccccaaagtccattgtatcattctgatgcctttgcatcctcatagcttagctcccacttatgagtgagaacatacggtgtttggttttccattcctgagttacttcacttagaataatagtctctagttccatccaggttgctgtgaatgccattaagtcattcctttttatggctgagtagtattcctttgtatatatatgccacaatttctctattcactttctgattgatgggcatttgggctggttctatatttttgtaattgtgaattgtgctgctataagcatgcgtgtgcaagtatcattatgcaacgggacttcggatgacatattgaacaacttcctcactgatatccttgtgaaacgctacatatttcatgggtctgtttgttataccaacactcaattctgaatgatggaattatttcacatttagtctctttttcatctagccattatagtttagtttaaacaccaagttccattcctgctgcatgctgaaggatttgcagtacatcaggctatagtccatcaattcattccacaattgagtaagtaaggtatctatagtacctcaggccctgtgttaggcagggatggggtaacctagacagatttggtacctgtcctcatggagcttgactttagcggcagagacagatcttagataattgtaccagtacttaagtgttcagaaggacaagtatggaggtgggagccactccagtcctctacagtcacgtgctgcacaacaacgtttcaaccgacaacagagcacacatacagtggtgttcccataagattagaatgccatatttttactgtaccttttctatgtttagatatacaaatacttaccattgtgttccagtgatctacagtattcagtatagtaccatgctgtacagttttatagcccaggagcaataggctatataccgtatagcctaggtgtgtagtatgctacaccatctagatttgtgtaagaacactctctgatgttagcacaaataaatcgcccaatgacacatttctcagaacatatccctgttgttgagcgactcatgactgtacaatgggggaacagctcagcctgccttccccaaggaggcaacgccgatgcagggaaccgagggttgaacagaagtgggcaaggtgcagagaggaaaaaggctttccagatggagaagagcatgtgtgaaggccctcagtctggcaagagcttagtcctgtgtggcaggagctgaacgaggggttaggggagagtggcaaagggtccgggccatcagagaggtcaacaggggctggatcatgcaggattttgaatgttaacatcagagcgatagaaaacatgaagggtaaggtggtttgggttttgaatttttatcaaaatattgcaactactcggcaacaagttagatataacaaaagaggtcatcgtaaaaacagcagtctaccccttccccttcccttccctgactcagacatgacagcttttaactgtttctgattttagttcctttgatggttacctccaaaattaaatcatatgcttatacatctttcttgatttgccaactttagggaactgtgttaactccctgaaatgaaagagaatgacttagcttacgttacctccccatgttgaaattcatattcacatttctctgtaattttttttttgagatggagtctcactctgtcgcccaggctggagtgcagtgatgtgatctcggctcactgaaacctctgcctcccgggttcaagcaattctcgtgcctcagcctcctgagtagctgggactacaggcgcacaccagtgcactgggctaatttttgtatttttagtagaggcggggtttcaccatgttggccaggctggtcttaaactcctgacctcaggtgatctgcctgccttggcctcccaaagtgctgggattacaggtgtgagctaccatgccaagcccacatttctctgtaaattttaaacagtattttagtccatatgtcagttcccctctttttaagataaggatattaataaccctacttttccttccactttccctccttaacttctgcgtcttaaaagctgtacttgaccatacccattcttgcatttgttaacatgtgtgttctgccctgcaaccacagccaagttgtagcttaattctaaagtcgaaaataacattatttacattattacacatgtgagtattgttcttggcgagaccaaataatgaatgtgcccaggattacatttccttctttacagatctggaccactcaaaggagaatgaccaatcaaggtcaaatggattcccttttcttagactctgtcacctgcttaaaatccttgctaggatttaatctacttcatattcaaaccttggcttgcttatatagctctttgttttgcccaccatttctagttgcctttttattttgtttactattcctccttgattatgttgtaaaatgctattagcagtgctgtttatttcgtacgattcggctttttccccactgaagacctttctcttggaaggcctctgcccttctgcaatctgggcaagtatctgctctttgatttaaggttgcatatacagctgtacctggaccttctcctcactgggctcttgggttggagcccgtgtcttaaaacccatatcttcctttcacatggtttactccctcgttttctggactgcatccttaaataatgtgctcagatagagtgcatggggagtaaactgtagtggataccgttgtcacctaccccatatccatttcttctttgcccattcctaacagaatcctgatattattcacctttctaccttattcccaacttcagaaaggatccttaagtcattccacacattgcattcctttggcaactgttactggtcaaggatggacatacgatctaagttggttcactcagactgaagggaaggacttccatggcacgttcagggaagactttctctttttctctcactggagtaagtgagaaaggtgttgctgggggctcttctgtaacctcagactgagggacaaagcctgaggataaagcctgctcaccaaggaaggcggagcagagaaacgggaagaacctgggtcttgatgccgttgcttagctggtgattgcactgtggctggggcctgtcctacctgagctagggactcagataggatggactttcttactgaatgagccagcttcagttttcttttctgttacttgtaaccaaaagcattgtaacagataggtcttctgagtcactgcatgcctgaaatacctttcttctactcttacacttgattggctgagtatagggttccaagttgaaaatcattttttctcctaactttggaggcatctcttctagtatgcagagtaacaaatgcaacaaatgcctgatgccaatcttattatggttcttttgtaggtgcccttcttttctcttccttccctggaagtttttaggatttcgtctccttatttttagtgtcctgaaatctcatgagaatatgtctagagttgtgtcttgttcactcgttgtactgtggtcattcaatctgaatacttttgtcaactcttttttttaaaaaaaaattactaatttacatgctttcattttctctatggggactactgtttaactttggacctcttatattggtcttctgtcttctctcatatttttcatttattgggcggtggggggtgctctgaattttggaagatctcctgcatttattttctttttccttttttctttttttttgaggcagagtcttgctctgtcacccaggctggagtgcagtagcctgatctcggctcactgcaacctctgccttccaggttcaagcaattctgcctctgcctcccacgtagctgggattacagacctgcaccaccacgcccggctaatttttgtatttttaatagagatggggtttcaccatgttgccaggctggtctcgaactcctgacctcaagtgatccgcccgcctcagcctcccaaagtggtgtgagccaccgcacccagcctcctgactttattttctatcccttctgttaaattctttatttcagccaaacctttttttttttttttttaacttactgtgaagcctgtgtgcctactgcctagattagacaattgttaacattttggcgtattttcctggtctgtatagatagggtgcatttttatacctttttgctcaccatttaaaaggaactcacagatgtcacgacatttcacccctaagtacttcagtatacatctcctaaaaataaggacattttccaatataagcacaataccccgatcacatctttaaaagttaacaataattctctaatgttatcaggcacccactttaaattcagatttcctccaaatgtctcttatcgctgttgaggggctccaaagcaattaagatttatacattgcatttgaatatgcttcctttgtctcttatttatttatttattttattttgagacagagtctcgctgtctcccaggctggagtgcagtggtgtgatctcagctcactgcaacctccgccttccaggttcaagcgattctcctgcctcagcctcccaaatagctgggattacaggtacgcaccaccacgcccagctaacttttttgtatttttagtagagacagggtttctactaaaccatgttggccaggctggttttgaactcctgacctcaagtgatctgcccgcctcggcctcccaaagttctaggattataggcgtgagccaccatgcccagcccctttgtctcttttaacaagaacagcctacccacctctccttcacttgtgatactgactttttgaagcagtcagcccaattgtcatctagaagggcccacattttaagatacatatttttagagatggcgtgtcactatgttgcctaggctggccttgaactcctggcctcaagtaatcctcctgcctcagcctcccaggtagctgggactacaggcttgtgccaccacgactagctggcccacattttagatgtctctcttttcttgtgatataatttaacttgtttgtccatatatattacttgtagacaagaagttaggtctacaggcatgttcaggttaaacattttgggcaagaatatttcataggcagtactgtgtacttcatatagcatcagctcaccaggcacttaatggttggttaccctgtggtttgtgatgctacgttttaacacttgattaaagaaggaggtgactgccaaatctccccattgtagacatacagttttcctgtggtaattgatatataatctgtgatgtgatgctttggcaccatacaaatatcctattgcccaacagccatttgcataattattttagcattcattgatccttgcctgaaaccattattacattgggggttgcaaaatgatagtttttttaattgtcacctcttctacatttagtactgtcattcctctgtaatgaattttccctcatcaaataaggaggcattatatttcctcctaaaaagacagtatagatgcttaatctttgcctttattacatttcagagtaaggagttggtagaataatcacctcaaatggtggcaaaatatttgctgttgtgtttccttttctctttcatgtcaatatggactcatagggatttatttattaaatgttttacaattcaaattgggtcaacaagagtcccttcatgttggttcctatattctcctggcataccctcattaattagtctttgagcaatttcttgttttctggcacaagatattccatcccaatatgtgcttttcgtgtcctagaactgattccaaggagctctggttccttatagtggcaacggtatttagaatccaacatgtgggtactaaatgtgctgattcttactggggtaacattatatctaggcactttcagaggacatcgctagaaaatatattcagtttttattttttatttttaatttttttgtagagacaaggtctcactatgttgcccaagctggtttcgaactgagctcaagcgatcctcccacctcagcctcccaaagtgctgggattacatctgtcagggcaaactgctggtaaatattttcacaaaagaaaaataaaaaaaccaaagtgctgggattacagatgtgagccactgtgccctccattttttttttaagtcataaatacataatgatgtcttctatggcaatttaacattacagggttcttccttaacttttttttttttttttcttttttttgaggcagggtcttgctctattgcccaggctggagtggtgcagtggtacaatcctaattcactgcagcttcaaatgcctaggcttcaaacaatcctcctccctcagcctcccgagtagctaagactacaggtgcatatcaccatgcccagctaatttttaaaaattttttgtagagatggggggtctcgttgcgttgcccaggctggtctcgaactcctggcctcaagtgatcctcccatctcgatttcccaaagtgctgggattacaggtgtgagccaccatgcctggccaacttttatttgatctgtatatatcttttccttacactgaaaatgttgggtcttactaatgttaacatagttacttatttgctttatcttgtaatagacataaaattacaaaattataataccaatattacgataaatagctgggcatggcggcgctcgcctgtagtcccagctactcaggaagctgaggtggagggactgcttgaacctaagagtttgaagctgcagtgagctgtggttgtgccactgtactcctacccggacaacagagtgagtggggggaaaaaaaagaaataatggaagatccagagaaagccccaaatatttaaaaattaaacaatacactttgcagcttcctcacctctctcagccttcatagaattgaagagagttagggccttgcactagattaggctttgccttaaggaaatgttgtgtttgatttgatcttttatccagaccattaaaacttccttaacgtttattagtaataaggctatttcactttcatatcatttgtgtgttcactggagtagcacttttagtttccttcaagaactttgattcacaacttggctaactttggtacaagaggcctagcttttggcttctcggctttcaacatgcctctcactaagcctgatcatttggtttttggtttaaagagaaagacatatgactcttccttttacttgaatgcttagaggccattgtagggttattaattggcctaatttcagtactgtcttgtccaagggaatagggaggcccaaggagagagagagagatgggggaacagctgattggtggagtagtcagaatatacacatttatcacttaagttttgccatcttttctttttctttttcttttttttttttgagacagtcttgctctgtcacccaggctggcatgcagtggcatgatctcagttcactgcaacctctgcctcctgggctcaagcaattctcctgcctcaacctcccgagtagctggtattacaagcgtgcgccaccatacccagctaatttttatattttttagtagagacagggtttgccatgttggccaggctggtctcgaattcctgacctcaagtgatccacccgccttggcctcccaaagtgcggggattacaggcgtaagccactgccgcctggccaagtttgccaccttttttattttttttattttttgagatggagtctcactccatcacccaggctggagtgcagtgatgcaatctcggctcactgcagtctctgcctcctggattcaagcgattctcctgcctcagcctcccgagtagctgggactacaggcatgtgccagcacgcccagcttgttttttgtatttttagtagagacggggtttcaccatgttggccaggctggtctccaactcctgacctcaggtgatctgcccggctcagcctcccaaagtgctgggattacaggcgtgagccaccccgcccggccaagtttgccatcttttatgggtgcagtttgtggtgccgcaaaatgatgatagtagtaacatcagagagcattgatcacagatcaccataacaaatataataatgagaaatttgaaacattgtgaaaattaccaaaatgtgacagagacatgaagtaagcacatgctattggaaaaatggcactggtaaacttgcttgatgcagggttgccacacaccttcaatttgttaaaaactcagtatctgcgaagtacagtaaagcaaagcacaatcaaatgaggtgcgcctgcatattacaaccaagaggcttttcgcagaaacacgagtgtgcttcaacattcaaaaatcagttggtgtaattcaccacattaagataataaaggaggccgggtgcggtggctcacacctgtaatcccagcactttcagaagccgaggtggacagatcacttgaggccaggagtttgagagcagcctggccaacatagtgaaatcctgtctctactaaaaatagaaaaattagccgggcagggtggcacgcacctttagtcccagctattcgggaggctgaggcaggtgaatccttgaaaccaagaggcggaggttgcagtaagctgagatcacgccaatgcattctagcctgggcaacagtgagacccagtatccaaaaaaaaaaaaaaaaaaaaaaaagataataaaggagaaaaaccatatagtctattcaataaatacagaaaacgcatctgacaaaattcagtgccctttcatgataaaaattcagcagattagaaatagaggaagtgcatgtatgaaagagctacagatagattgtacttaattgtgaaatattgaacatgttaccccgaaaatcaggaaaaaggcaaagatgtccactctaaccacttctattcaacattatactagaggtcatagccagtataatgaggcaagaaaaaacataagaggcattaatatttaaaggaagtaaaactgtttctatttgtaggtaatgtcgaaaatgtgaaagaaactatcagaacctgctagaactaaaaagtgaattcagcaaggtctcagggtacgagatcattcaaaaactaatcagaaatgaaatttcaaatgcaatatcgttaggaataatttaataagaaatgtacaagatttacacgctgaaactgaaaatgttgctgaaagaaattaaagacctaaataaatggaatgttgtaccatgttcatcagctgaaagactaagtgtctttacagtgtcagttctcccttcattgaactgtagattcataaccccagtcataactgcagggttttttttgtagaaattgattgtaaaatgtatatggaagctgggcacggtggcttatgcctgtaaaccagcactttgggaggctgaggcagacagatgacttgaggtcaggaatttgagaccagcctggctaacatgacgaaaccccgtctctacaaaaaatacaaaaattagccagacatggtggcacacacctgtaatcccagctacttgggaggctgaggcatgagaatcacttgaacccggaggtggaggttgcagtgagccaagatcatgccactgcacgcccgcctgggcaacagagtgagactttgcctcaaataaataaataaataaaacgtatatggaaatgcaaaggacctagaacatccaaagtaaacttgaaagagaacaaaattaaggggcttatgtgatgtgactttatagtcatttgatttttaacagaggcaccagaacagtccggtgcgggaaaggaaagtcttttagcacgtgccggatgatggcaaatgacatccataccagacaaaaatgaaccttgaccttaccctaaatattagtttcttagagttgccacaaactaggtggcttaaaaccacagaaatttggctgggtgcggtggctgacgcctgtaatcccggcctttgggaggccgagtcgggcagatcacctgaggtcaggagtgcaagactagcctggccaacgtggtgaaactttgtctctactaaaaatacaaaaaacttagtcaggtgtagtggtgcacacatataatcccagctagccaggaggctgaggcaggagaattgcatgaacctgggaggttgcactgagccaagattgcaccactgcactccagcctgggtgacagagtgagactccgtctcaaaacaaaaccacagaaatttgctgtctcataattccagagtctagaagtccaaaatcaactgtcatcagggccatggtctctgtgaaacctgtaggggagtccttccttgcctcttcctagcttccagtggttggcaacctttggcattctttgatttgcagctgcattacttcaatatctgtcttcctcatcacacagcattctccatgtatgtctctgtctttacatggcctccttcttgtaagaacaacagtaatattggattggggcctgccctactccagtgtgacctcaccttaactaattacacctgcaacaacgctgtttccaactaaggtctcagtgtgaggtactgagggttaggacttcaacatatcttttttgggggacatagtccaacccatgacactacttcacaccatacataaaaattaattcatgagagattatagacctaaatgttttaaaagctaaaaatataaagcttctgcaagaaaacataggagaatatctgtgcagtccaaagaataaggttttttttaaacacaatttcactctgttgcccaggctggagtgcagtggtgcgatctcagctcactgcaacctctgcctcccgagttcaagcgattcccatgcctcagccttccaagtagctgggattacaggtgtgcgccaccatgcctggctaatttttgtatttttagtagaggcagggttttgccatgttggccaggctggtctcaaactcctgacctcaagtgatctgcctgcctcggcctcccaaagtgctgggattacaggtatgagccaccgtgccaggccaaaaaaagatttattaggatacatgaagcaatagctattaaaagaaaaaataaattggacttcattaaaatttaaaacttttggtcctcaaaagataccattaagaaaatgaaaagacagagctgggcgtggtgaggcttgcctgtagtcactactgggtacttgagaggctgaggcaggaggatcacttgagcccaggagttctaggccaacataggcaatatagtgagacagtgtctcttaaaaaaaaaaagaaaaagaaaaaacaaaagaaaataggctgagagctgtggctcatgcttgtaatcccagcactttgggagtacaaggcagatggattgcttgagctcaggagttcaagaccagcctgggcaacagtgaaatcccatctctacaaaagatacaaaaaattagccaaccatggtggcgtgcacccgtagtccatagtcccagctactcgggaagcagaggcaggaggattgcttgatcccaaggaggtcaaggctgcagtgagctgaggtcgcgccaccgcaccccagcctgggtgactgagtgagaccctgtctcaaagaaaatgaaaagacaagtccaccaagaaaacagttgagaccagtcatagaaaaaatagaaagtcatatctgacaaaggatttgtattcagaagaattcctataactcggtaataaaaagacaacctgatttttaaagggtgaaaatattttaatggatacttttttttttttttttgagacagagtctcactgtgtcacctaggctggagtgcagtggtgccatcatacatagctcactgcagactcgaactcctgggctcaagtggtcttcctgcctcagcctcctgcgtagctaggactacaagcacgtgccactatgcctggctaatttttaaattttttgtagacatgggctggtgtgtgtctgtgttgtctaggctggtcttgaactcctgggctcaagtgatcctcccacctctgccccccaaagtgctgggccaccacgcctggtgtggtgtcaccagagatgagccaccatgccctgcctgatacttttcttttatcatctgtttatttcttgtttatgggtgtttctgttctgattttatgactattctgtattctaagatttctctgagaatattatttgtttcctctaaggacagacttggtctctcttccatggggctggttcttgagccgccagggatggggggaggacctgggtagctgctgcgctgccccttctctgctgtggtggagtggcccgttgcctgcggggtctgtctctgaagggtggtttggagaagttctgtggaggcgaggcaggggtcagctcttgccccatggaccctcagagactgggaaaaggtaggcatcacctgggctgctgccagccacatcaagagcctttggggtgggtggggtgggggccggggaagggaaggttctagctgttgatttagaaaagacccattgatttcttgcctgagggaagaagtggcaccttgccactccaagtttgctctgctcaccagccccaacagcatcagcctcacctgggagcttattgaaggtgccctgccccaaagcttgtgggtcgggatctggcagtcagcagcccccaggtgttgcacacatgacagcactgcttgcccctcctctcgtctggtctggtctggtctggtctggtctggtctgagagcttctttggggctctgacaggtatacaggctctcatctgctctacagctctcttgtagtacattcctctctgttccattagtcaacatgttcttgcctacttccagcatctagaaatttgctgagtgtatcttatccgttcagaggtcctctcctgctattgcctctgttagaaatttcttccctttcatatgtctgtacttcggtttctttgaggtttgaagggtcaagtggcaattacatgtaggcagttggccatcctctggtgaaggctttaaagcccaggaataacaagatccattatgtctaaaactagcaaaaaccctacctgtcacatggtgaactgaattagaggtgatggggacagaagccagattggagtgagtggaaggtgagggagtggagattgggtatagacaactctctttaagaagttttgttgtgatggtgaccagaaaaataggagtggggtagagggggatgagggtgtttttcacgtgggtgaatatgagagcatgtttacatccttctgggaatggcccaggagagaggggagcgtgagaaggaggaaatggggacctggaggagcagactccttgtgtggaggggggaagcggcatctagagctgttgcaggaggtgggctttgagtaaatgcttcctctttggtaaagacggggaacgggaacggtagaagttgcacggaccctttgttaaagctcagaagctgagcgagaattagagcttaagtttatggagtagtcagaataaagtacccctaactgtattcttgcacagtgcaggaagccaggggtctgaaatcaagatgttgcagggctccattccccccagagcctctagcatggatccttccttgcctcttccagcttttggtggctgcctggcagtcctagactttccttggcttgcagttgcattgctccattctctgcttgtgtcttcacatggccttctctgtgtccccgtattcttctctggatgcttgtcactgtattaggcccaccctaaatccaggatgatctcatatcaagatccttcacttaattacagaagcaaagaccttccaaataaggtcagagccacagggtctgggggttaagacatacacctaactattcggggctaccatcgaacccctgtagaagcctgtccatttccaggatagcagagcccaaggaagggccagaagtccccccaaaacagttgtttgcattcaccagattctaagctataagcagatgggcagtggcagtcggtcctaatccatataccattggcaacaatagtttagttcactgtagacataatgagatgcttatcttctgctaagtagtcctcatggtaacagccatattactcctggctttgagtgacagcgctgtgctcttgtctggtgcccatatacttcagcagctggaaacaagacagtgctcatgattcaccggaaagtttctgtagttaaaatcaagtgatcccttgagtctattctaatatttgtctgtaccatgttctgtgacgagacatggaaacaaaacattaagaagtgaaagtatctttgattatgctcttgaagacaactttttgtttgtttgttttgtttgagacggagtttcactcttgttgcccaggctggagtgcaatggtgtgatctcggctcactgcaacctccgcattcccgggttcaagcgattctcctgcctcagcctcccaagtagccaggattacaggcatgcaccaccacgcctggctaattttttttattttagtagagacggggtttcaccatgctagtcagactggtctcaaactcctgacctcaggtgatccgcctgcctctgcctcccaaagtgccgggattacaggtgtgagccaccgtgcctggccgaagacaactttttaaagatgcatatgctctgggctgggtgtggtggctcacacctgtaatcccagcactttgggaggccaaggcgggcagatcacctgaggtcaggggttcaagaccagcctggccaacatggtgaaacaccgtctctactaaaagtataaaaattagccgggtgtggtggcgggtgcctgtaatcacagctactcaggaggctgaggcaggagaatcgcttgaaccccagaggcggaggttgcagtgaattgagactgtgccactgcactccagcctgggcgacagagtgagacttggtctcaataaataaaataaaataaagatgcatatatgctctgaaggctggctacattttattttttctcaaacaacttttacagtggatagtgctgtaaaagttgtttagctctggtcattttatcttttttgtgatctgcaaaaggagatccttttccttttcactgcctctaatacccaactccaatactcctttgacctcacaggcacttagaatccatcagtggctccatcttttctcagacttcacctccttcgtatccttattcctctcctttgtagcttcagtgccagtcagacgtcgttactccctggcacactacctcagcccttcggcactttcttgctttgttatattcagtcgacaaagccccagcctcatgaaattcagtcatgtctgccccatgcctgctccgtcctgaagctgaatgtgactccttcattgattccccctttaagttcatgtctaccccaggtaaacttcttgccgccaagcccacctgcatactgcagttccccggtctctcctagcccctcccaccctcctcatcagctgtcacacctccttgcagctgatatcttagttcccagagagcacagaagcaagctcaagagagtgtctacaggccagcgtctactccttcgctctgcctccctcatgctgtcacggagcgcctgtcccaggccctcactcctgttctaaggcatctctccagtcctctactgcactctcccccatcagagattcctccctcgcctgccctagaaacttgttgctacttctcccaccttgacaaaagctgctcccaaccccccacctgtctagcatctctgttttcctttaccagcaagactccagtccctgtctccacaccctcttcaaccttctccagttgttcctttgctgccacagctctgccaagctgctccatgaggtctccagtgatgaccttcatgttgttaaatctgggagctgcttgtcacttcttttcccagagctgtcgtcgtcagttaaccccaatacccatacgagacaatcctttccctcccttgagtctctgcactgatgtgcaccttctcagtgcaaaccacagcttttgtctctttctagctgaatacatgactgactgtgcttatcttagctgtcacccctgctggagcagaagctccacaggacaggattgtctccttgattcacagatgtagctcaagctcctagaacagtgcctggtgtctgtgggtcctcaggaagtcctaggtgagtgtgtgaatgtctgtcctcctcggtcttttctgtttcgcatgtgatgttggaaggcctcaggttcaggcttttcttctccaccctcactcccgaagtgattccgtccagcctcatggctcccaaatttatgtctccaggctgactgggtcacgggaactccttatcctccctagaccttctctttccctggtcttctcctttccagtaaacagcaactccaactcctgctcctcaggccagaaacctggcgctggttacctcatttgttcacaaatactgttactccacctgcaagatggatacaaaatctcatgagttcccctgcctccatggcccccaccctggtccaggtgtccagcttccctgcctctgcccttgccccctggttctttgtttagtcctgcaatattgtgctcttctgttcagaaccctccagtgggtccctgcttgctcagagtcacagcccaacaggatcacctctcttgccactctcccaccactcatgcactgcggcctcactggcctcctggctcctccctggaccctccaagtatgcccctgcctcaaggccttgacctctcctctgccctctgtcccaggtatcacacatgtctgctcaagtgtcaccttcccaatgtggccttccccgagcacacccatgtctgtaagtcaggcagcctgcctctgccccaccagttccccctgcctagcataggacttgtcaccatctgccacaagctgtgttactgcttggttttgtttgtgctctcccactcccttcccctccctccctctccccacccctatagaatctgagtcccatgaggacagagatttttttttttgcctcttcctcaatatatccccagtgcctagaatcatgcatattttaatttattgagtgaattaacaaataaattctgcagtgggacattgctctaaggttttgtcttataagagggacagaagaacatgcagcctgctctgctgttggctccttagcttctccatggctaacaggaacaatattgtttatgagataatcaaagccatagtcatgagttagaaggtacatataaaggcaaatatgtggagattgagttactttggcgggggcggaggggtgtgtagttatctgaaaacatggaacaaatcaatgagagtctaaatagcacccacatatttgcccctcttttaaaacatacctcctttatgagtgtagaatttaacagcacagtttcccagtgcagctttgcgaaacaagagaaatgaattttaaaggctgtcaggtgcctttgcaatctgtggcttagtatttgtgtaacaacatttgtgttttgccaacagatgtactgcttaaagtacccatgagaatggcctctgtggttttctactttctcggatggaaccttaggaactgattattgagaagaggctgatactgcccacctcagctcccaggcaggcttcagggccttggttactactcctttgggccctcactgacccttgcagacgtcttttgcaacctctgtagccagaagagacaactgctttctggcatgttgctctttccctaatggctttatgagcttcttgaacaccaaagcatgtgtgacttcctcacgccttcccctgtatagtatagcacccctaactgtatgtgtaaggagaaggagtgagcaattgatggcgtccccctggatctccaagggaatgggaaggggcagggtttctggattcagtcatgtggaatctggtcgttggtgtctaaatgtgcctgttacttgtgcccaatgtccaggttcaccaggaggcttagcctgctcatttccctgctagtagctatattttgggagagcattttttatgctctaattgaactttgtgggtctcagcaatttgaacaatgttttgtttttcttctggtcaggttacaaaggaaagaaaaggaatctggtgttgtaggaggtggtgtgttgtgtaattacttgttttttttttttaagtttttttatatttttgcaacaaggcaagttttctttgaataaataatgctgggagcttatcacatagaaggcatatgtgttgtactcagtacattctgaattatctgggtttatttttatctcttgaattcacttataaacaattcaaaggctgcttttttagctaacagaaataggaagagaatctcagaatctgttttgtcattttttcaatgggttgagttatagtgattatgctaactcggtggaaaagcagtgtagtgagtaaaccccacatacggcatatcatgaacattttgttgcttttttggcttctgaccatcttcatacctttttttgtgttaaaagtctccccattgtgtatatcttagtaagaggcaggtggaccctagtttctacctaagaaaacctgaagatggggttgggggcctgtggtgtacttccttctcatgctgtccatgaccactgcagtggctttgtaaggatccaggacccagggcccctcagtgggtgtcttccatttctcaagattgcctcttggttgtgagatgacggttgctgctctagtcattgcatccactcctccaggtaggaagaaagaggtcataggggaaaggcaaaatggcacttgacatcttaacttctaggcccattcaatatttccatttccatcttcacacccatcatcttgtcctagggaacaaacagcaccagcagctcagtagctataacagcaattattatttctcacacatgggtctgggtcagctgcaagatgggattcagatctgttctcaagcctgtcgttccaggacccaggagggagaagcagctgccaggggaagtctcttcgtaggcggaggtcaggagtccaagaggagtgagcagagtcacagaagcctcttaaagcctcttcttcccccatcccatcaacacgtgagcaagcccagagtcagtgggtgggaggtgtgctccgcccatagtcagtagaacaagagcaagcttgaaagagaacgatgaacaggagtgcactcggccactgtctccttagccataacgtagtcccatggtctgctgggaagcggggaataactctccttagctgagcgcagggtctcattagtaaggcagatggagaacatggatgttgggggacaactggcagtgcctgccacaggggaatggatatattccctccccttgctctctggaaactaggggatggcgatgaagcctaggtttggccaaacccattctgccttcagggactttgactcttgagggacagtgagggattagtcatggtggtggcagttgagtcacaaaaccagcagtggtggctaatgtccagtgatgacatgcaacagtgcccagggtgggtgtcccaaccagcaggtccctgcagtataaccttggctgtgtttgcagtggtgcagcctctattcctgctgcttttctgagcctagttctctagttctctctccatttccagatctgctgcccaagaactcctttgtgattgaatttaaccagagttgatttctgttgcttgaaactcaggaccttgatgcagtgtgcagggtctgggcaaggtaaaaacacactttcatgatttcgcctcaagtatagtagatgagcttaggctttttgagccaggtagccttgggattaattctcagctcttgcacctagcaggtgacctcagcaatcaagtcacttgccctccttgagcctcagtgttgccctcagttaaacattgctctcgtgtgttgctgagcattcagtgagattgtatataaagtgatcattgtgaaggtattgggacataatttgggaaagcgtcctggtctaagcttttgattggctctccatcatttgggtaatgggatagtgatttaggagtatcatagcagctcaaggggcccttctggaaagggtatgaggaaggtcagggacaagtctgaaatgaatcatcctaggcttaatgcctgtgactgggcagtgggtacaattatctcaggctagtcagtagtcatttattgtgagaatacatgggcagattttttaatttccttctcagtctagacttgaatgcaaacagttcttattgctaacttaccactagtcaccactaatgaacaaagactatgaacaggaaattcataaaagaagagatacagatggccaatgaagataggaaaagagttctgcctgctggtaatcaaagagatgcaaacgagaacaaaaatgatgccttttcacctaccaaatttgtcaagattaaaaagaaagcaaagagccagcgtcagctgatgttcatacctgcacctgctcggtagcttgctaatgttctgcctgctccacacgccaggccagcctccacggcgcagccaggtgaggcctttccttgtatacaggcacgtttggattcactgttgcataagtgagacatgtgcatgcttcacaattcaggaagtgcaaactccagagtgatgcaaggtctgagtgtccctgctgccctggtctcccagctgcctaggcctctcttcagggaacggctgcatccagggtcttgtctgtgtcttttgaggtgttctatgtacacgcagacacatctaaacctatttttattttccctgcacctgcttgggctactgtaagctgttaaatttttttttctaggaatttgtccattttgtctgactagcataaagttgttcatgttatagtttatacatttgcaacatctgtaattatgtctgctttttcattcctagtgtttgttgtttacttgtaccttctcccgtttttccttgtcttggtaaaagctcattaggttcattggtcttacaagaagcagacatgtaggcattattgccctgtattactctgtgtctcttttctagttcattaaattctgcttttgcttttatctttattattttttctatggtcttagagtacattctctgtgttttgttgttgttgttgttgttgtttgttttttgttttgagagagagagtcttgctctgtcgcccaggctggagtgcagtagtgcaatctcagctcactgcaacctccacctcctgggttcaagtgattctcgtgcctcaacctcccgagtagctgagatttacaggcatttgccccacacccggcaaattttttgtatttttagtagagatggggttttggcatgttgaccaggcgggtctcgaactgctgacgccaggtgctccacccgccttggcctcccaaagtgctgggattacaggcatgagccaccacgcctggccctaacttcttaagttataaatttggttcattgatttttctacccttttttcaaatgtaaacatttaaggctaaccctctggaactacttcaactgtatctagcaagttctgatagtattgtcactttaagttagcccaaagatattttaaattttctttgtttcttcctttgactcacatattattttaaaatgtgtttttcaatttccaagcacatggctttgggtttgttttttttttttcctagttgctctagaaaaaaaaattgactgcatgaggtggctcatgcctgtaatcccagcactttgggaggccgaggcgggcagatcacctgaggtcaggagttcgagaccagcctggccaacatgccaaaacctcgtctctactaaaaatacaaaattagccgggcatggtggcacacacctgtagttccagctactcgggaggctgaggcaggagaatcacttgaaccgggaggcagtggtcacagtgagccaagattgtgccagtgtactccagcctgggcaacaagagcaatactccgtctcaaaaaaaaaaaagaaaaaaagaaaaaatcaacttctaactaaatggcactgtgatcaaagaacttggtctgtgtgacaccagttcttgcagttggttgagaagtgctccatgacacattatccacaaccagtggacagaatatgtcaccaccaagcatgggtgcaggattctacatatattcattacctctgtcttatccgtttgttgtgaaagtattttctcttcttactgtcattttgtttacttgatttatcaactgatggaatacgtgttaaaacctactgtggtgatggacacatcagtttctccacagagtttggtcattttcattttattatttattttgaggccacattttcagttttagatacagtttcacattcctggtgtattgaaccctttggtattatgaagcgaccatactaatatgttatttttttttaaattattatttattttatttatttttctttcttttttttttttttgagacagggtctccctctgtcacccagtctggagtgcagtggtgcaatctcagctcactgcaacctccgcctcctgggctcaagtggtcctcccacctcagcctcctgagtagctgggattacaggcttgcaccagcgcgcctggctaagtttttgtatttttagtagagacagggttttgccatgttgcccagactggtctcaaactcctgggctcaagcagttcaccagccttggcctctaaaagtgttgggattacaggtgtgagccaccacgcccggccatcccagttttttattttcctcctttctgtgtctttatgcatcagtgaggtggagcttttgaaaatgtcagatagctagattttttttttttgagacggagttttgctcttgttgcccaggctggagtgcaatggcgtgatctcggctcactgcaacctccacctcccaggttcaaaacaattctcctgccgcagcctcctgagtagctgggactacaggcacgtgccaccacacccggctaattttgtatttttagtagagatgtggtttcaccatgttggccaggctggtctcaaactcctcacctcagctgatcacccgcctcagcctcccaaagtgttggaattacagacgtgagccaccatgcccagctgatagctagattttttttttttttttttttttgagacggagtcttgctctgtcgcccaggctggagtgcggtggcgcgatctcggctcactgcaagctccgccccccgggttcatgccattctcctgcttcagcctccagagtagctgggactacaggtgcccgccaccacgcgtggctgattttttttttttttttttttttgtatttttagtagagacggggtttcaccgtgtcagccaggatggtctcgatctcctgacctcgtgatccgcccgcctcagcctcccaaagtgctgggattacaggcgtgagccaccgcacccggcctcgagattttttaaaaaatccattgtctgtttcgtcctttaacatctatttgatttctgatgtatttagattcatttatagcatatttgtgcattctatttttccatattttctgttcttttaaattttccttctcctttcttgccttctcttagacttttaaaaaaattgtagtaaaatacacatcacctaaaatttaccatttttaaatgtacagttcagtggcattaaatacaaattggaggccaggcatggtggctcatgcctggaatcccagcactttgagaggctgaggtgggaggattgcttgaacctggaggtcgaggttgcagtgaggtgtgatcacactactgctatagcccaggcaacagagtgagaacctatctaaaaaaacaaacaaacaaacaaacaaacagattggcatcacacagtgtgtgtgctgctgtgctgtgctgttatcatttaacattaaaacataaacatcagcactgttatggactgaatgtttgtgtcccccaaaattccagtgttgaagctcaaacctccaatgtgatgttatttggagatggggtatttgagaggtggttaggtttagatgaaatcaggagggagggtgggtttcgcatgatgagattagtgtccttataacaagagacagcagagagcttgctttctccaccatgtgagtatgcaatgagaaggcagccatctccaagtcagaaagagagccctcaccaggggctgaatgtgctgacaccttgatcttggacttctagcctccagaactgtgagaaatttcagttgaataggccccccagtctgtactattttgttatagcttgagcagactaatacacccatgttatgaaaagctataaacatccctttaaaggccacctaacgcgtcgtattacctcatgcatcttctctgctgagctttccaaaagagtggcttaggctgggcctggtggctcatgcctgtaatcccagcactttgggaggccaaggcaggtggatcacctgaggtcaggagttcaagaccagcctgaccaacatggagaaatcccgtccctactaaaaatacaaaattagctgggcgtggtggcgcatgcctgtaatcccagctacttgggaggctgagccaggagaatcacttgaacctgggagatggagggtgcagtgagccgagatcgtgccattgcattccagcccggccaacaagagcgaaactccatctcaaaaaaaaagagtggctggccgggcgcagtggctcacgcctgtaatccccgcactgtgggaggccgaggtgggtggatcacgaggtcaggagttcaaaaccagcctggccgagatggtgaaaccccgtctctactaaaaatagaaaaactagccaggcgcagtggcaggcgcctgtaatcccagctacttgggtggctgaggcaggagaatcgcttgaacctggggggcggaggttgcagtgagccaagatggtgccactgcactccagcctgggtgacacagtgagaccccgtctcaaaaaaaaaaaaaaaaaaaaaaaaagtggcgtatgttcccggtctccacctctcattcgccagcccctgtgaccaaacccctgggattagatctccatcgggtccctcccctcaccctaacctcacatgcagtggttcctgagaagctgctgtttatctgatcacgggatccagcaggatctgagggctcattcactgaatctgtactacccaacaaggcaggcttgtccttacccacacttttcaggtgaaaacttaatcagattcaagcgtttatcttagtggcctcttcgtggtgtgtgatttccttcttgcagctctttactggctaaaactcttcactgggagttaaaccaggtgtggtccttgaccctcatcattttgtcccatctcctatgctgggctctgtatccttgtctccaagcagtctcgtgtgacagggaagttacctattattgtatggtcccctcttcttgtcacctctggtgtggcacttgttccatttcttgttcaatgaatgtgatttgtgaatgtgccacatctgtgggaggaaggcagttcgcagcaagagttgtagttcccttgctttgccctgagggccaggactttacactagatttttttgttgcattcctgcactcataaagtacacgtaaacttagaggtggtgtgttaaatgctagaacttaaaactgagttcagctaggctcaagtgccccacaatttttgtcccaccagacaatttcatgaatatctacagattgttccctcaatatgcctcaatattgaggcatattgatttggggagcacagacaagtcaaggttgatgtgcatccgctgaacatgatcttaagttgttgaagtaggtattattaatgaacgaacgtctattttagctccaagagcccctggtcttccagaagagactcccaatgatcttccagaagcagctgggcttcttttggtcctcccccacccaggtgcagtcccgttctccctgcctgggtgagtttgattcctctgccgtggaataggctaggctgctacctcttgagcctcttccaccaggccatccattaggtggcgacagagagcactaaaaggaactactatggaaataaaacttgttttgcttcttggggggaaaaaaaaagaaaaaggcttgtggggcgtgtgtgcattttagtcagattttactgtgcaaaacatttgagagatttctgccctctttctcccttccattcttctcaacccactgggcgccctaccacccctgtctccttcaagataaggtagatcagaagaccaaatagacaaatgccatgtccactgttttctgtcacagttgatagccataccagtcacccaagctggaaacccaacaggcccctgcccttcactgcccacatccaagggagccaccaagtcccacaaattgttcctttaactgtttgtccctcttttgtcttctgtcatcccttctaccgctgtcctggttcaatccctcatcttgctctgggactcccatgataacttatgatctttcctccacctctctatcttccacacaatccctatcatcaatctcattcccctgctttaaacccaagagtggcaccctgtgtttgagtgacatcagggcccctcatgtggctcctgcttctctttgtggccccttctgttgctgctgcttttcttatggacatagccctcagcagtccaggactgcttgtagttcctcccaggtaccatgtttcttgcactcctggcctttgtcattggctcccctgcccaagtccccttctcttctcctttccttcccctgtggccttgccttgtcgtgcttatccttgaagaccctgtcaggtatctcttccccaaagagccctgcctaaccaccgcccccctcccccccgcgacacacacacctgggttaggccctgcctctccacgcctgtgcctcctgccaagtcctcagaggtctctgatcccatgtgcctccaggcatggcatagggggactgtgacacagcctctcggcccacagacccctgattgtgggcttgctcactgccccagtcagtcctcttattgaggattccgtgccagttcctgactccagcacacacacgcatgtaggccgccctcctagtgcctggctccttccctgtctcttctgccactcattcccatggtcgtatcctggagttggtcatctctggaactccacccacggagttctaacttagctctgcctatgatgaggacttactgtcttcccagcttgcagtgtcaaccactgtttgatgcccctgggactccattggtcttccctcctcttgtgaactgtgcccatcaccagacgaacttgttttagaatttaccatcgtaactgagctcccttcagcgcatacctccttggctcctgctcagtctctgtttctccttttagccaaactctctaagagttctctccactcatgggccctcttccttgcctgctgctccttgctcagcttgctccatgaacacttgcttttccacattccatgaaataatcttaacagtcatcagtggctgtcactccttctcagccctttccttgtgtctcttctggtacctcatactctccaggtggccatctcacctcacatcttgaaccctctgggtttgggagaattctcacctcacgagttgatgggaggcctggcgacctctgattgtagtcactgcaaatgccagatgcttatttgcctagcttccctttcggtcagggcagcagttggcaaacggtatctcaagggccaagtccggcccactgcctgttttcgtaaatgaagctttaccaggacccagttccaccccgtcctttgtgcattgtccaagactgctctcctgtacaacagcaggtgggctggttgtgacagatactgtctggcccacaaggtggaaaatactatctggccccttacagaaagaaattacctgagttctacacgagggtgtaggtatgtaccctggcctctgccagtcagactcacatgctaggaggagcagggccaggcaggagagccgtgtctcctggcattggggctgcaggaaagacgagctcctaggccacagtgccagtggccagtgctgctgccttgcagggtcgcacaggcagtgctggctgtttggactggcttggcagaaggatttgaagtattgttcctagccaactggactcaaacctgttcctccaaccctctagggattctcttatcacccagtagccttttccccctagttttaaaaattgcagtaaaatacacaaaagataaaatgtactgccttaaccatttttaagtgtacaattctgtggtattgagcacatttatattgtgcaaccatcaccacatgcatcttcaatagcttttcatcagtccttgtctgcataaatcagctagagttggtttctattgattgccaccaataatcttgacagatatgtctgatcttccttctctgcactgactcctctttctctgtctcctctgctgattctttctcctcatcacaactccaaatagcagggggagggttgtttacacttatattcagcacgccctcacgcactcgcctggctcttcagacctctcccctgaactccagattcatacatccagctgccctttaggcctctagaaagctaaatacctcagtatcaaaaacatgagaaacggaagccagagtcctggatctctcgccctttcgctgtcccggtgcccatgcccttcagggatggcacctagaccagctccctgcatccctgcctagactctgcagtagtctcacgtggcagacccggaggtcactctcctctctggatgccctgcggacactccggttagcctcagctgcaagagcctcctcacccaaggtcacgccatttccaggacagcaccctggtgactgagcgaggtaagggtacaaggcccttatagggccttctctttgacttcttcccacctccctttatggatgtcagttcctgatgaacatcttacacctcaaaccgtgacccaacatctgcttctgcagagcccccctgtggcatcttgtgccctcctgccccactccctctactctatatcttcccatagttagaatgggctttttttttttttttttgagataaggtctccctttgtcacccaggctggaatgcaatggcacagtcacgactcactgcagcctcaacctcctgggctcaagcagtcctcccacctcagcctcccaagtagctgagactacaggtatgcaccaccacacctggctaatttttatattttttgtagagactggggtctccctatgttgcccgggctggtctcgaactcccaggctcaagcaatcctcccgccttggcctcccaaaatgcaggattacaggcgtgtaccagtgtgcccagcctcagatgggctctttgaaaaatgtttattagatcaggttactcccttgagaaaaaccctctcagaataaaacccgaagtccattacttgaaagcagagccagcttcatgggcctttgtaactgcccatgggcttgctggaacccaggcttggtttaatactctactctcaccatctcaaaattcttaatttttgaacaagaggccctgcattttcattttgcaccaggctccacaaattgtgtaactgggcctgcctcagcagccacatggaacatgatccctccttgcctatttgagctcattctctaccattctctcccttgctcacctggctcccactgctcttgctcttcctggaacttgccataatgttgctagagtcagagccttggctcttgctgctcctcattggctggacccctctttacttgacctgctccctcaccactcacttccttcagatctgtgttcagatttcgtcttctcagagaggcttttggcccctgtccatctctctgaatttacctctgacctctcccccaccaccactgcgctaagctgcctcagaactttgtagacattctgtctggtcttctgatgtttcccccttggaagaatcccaaggtgcctgaagaatgctttctttatccttgaagttgagtaggttgactagagtctggcttgctattgagcattctttatcaaattgtcctgggaacatggtgtattctttcagtctgcagatgtagtcgttgctgtttcaggtcagctctcttatggatctttgacagcatcttctgttccatttgttgagttctgtacttcagggacacaaattcctcatgttggattgtctttgtctctcttccaatgctattagctttgccgtaattggtttagcttttgtctttttcatctgcattcactttgtctaatttgattttcagctatgtatattctgtttctggctgtttttcaatgtatttattagtttcataatgatgtgttttggtctgcagtttgtttctctaggttggaaatttgtcttttcatcttattctgttttatcatcccatctttgaactcttttattgggaacatgttcttatgaagttgtggggaatttttttcccttccttgtgtattctcttcttggtgggagactttgcctttctcgtgccatctccctccctgggcctcttttttttcttctggccataatatgtttgcctagttaccatgtcacttcttttcgtcttggctcaggcttggatggctctgcatagtcgttctgtttgctttgagacagtggaggaattcttggctctctcttcccagtttcttggcatcttctcttgctgttttcccctctgagctatcgcgtgcaggcttgttatcttgtatccggagagaatttgcacgctggagggagctgcagccatgtagtcttcagccctatctggattcttctctttgttctaagaactgtgttggatgtcttactaaggctcactctagctgcacgagggatgtgtgtgccatttccatggggatagggggcacctcagtctctgggtggttccataatctgtgtatacctaagagcagttgcttcccacagagctgggctggctcactgggcactttgccatttctcctgcacctcccagctggagtttctgggtctaaaaggaaaaagtgaaggactcccacttggttgcttctctccagcttactgactgcaaattcccagggcgttgcccgctccctagggtggtttctgggggacggggcaggagcctggctttgctgctgctttgtcctctggagtcttttctcagactgctttgaattacacccctttcctttgtgtgctgaaatcttcccttcacactctccttccctgcctttcttttgtgtcttatcttactaggactggaagagggcagttgtgcaggaggtctgcatctaattccctaatccatgtgagagtgctcctgttgtgtgctttgtgacatgatggtgagaaatactccctagagcagtggctaccagaaggaagccatccccccccctgcacacacacacacacacacacacacacacacacacacacacacacactccttctggctgtcctcagatgcctattctaggtaaatgtcagattccaaagaaaatccagttgagatcttttttctttttttgagacgagagtcttgctgtgttgcccaggctggagtgcagtggcacaatctcggctcactgtaacctccgcctcctgggttcaagcgattctcctgcctcagcctcccaagtagctgggactacaggcgcgcaccaccacaccaggctaaaatttttttgtatttttagtagagacagggtttcactgtgttggccaggctggtctcgaactcctgacctcgtgttctgcccgcctcagcctcccagagtgctgggattacaggcttgagccatcgcgcccggcctccagttgggatcttgactggaatgactggtgttcaatcattatagtttccacctaatttgtatttgtacacaggacagttactaatttgttggtacttgtttgatccccagtccctagagttgtttatggggtggagcttcagtccctgctgcttcccctgtggcagcagctggagtcagggtggggacccagggtgctgctggcagattcttgagacaggtagaatctcctctatattggtgtctctctctgtcccagcagtgcccaggaaaacctggccagcctgtcactgacctctccacctagggcactggtggttcaggtccttctatttgccaccggcaaaccgtacttctgccagtctggctcttaggcccagtttctctgatcttgcagattttcttgggctctgctacggaatcctcatacctccggcaggtccctcctttgcccatgtgtttaactgtggtggaatcgtgtgagagctgcttctctcgcatggatcccagccacaccacattctacagcggttcctctgaaggcattgatagagatatttcctcctgttttgcatttcgttggtcatttcagtagaatcagggtgaaataaacatgggggctcagatgtcagcattacgaaccaagtacgtcaggcaggctgatgtggactgacctacactagtgagacgcaagatgacgaaaacaagggcactcactccaagttactgatgagatgtttggatcaaatgagccagtccttaagcagagttctctagtaaaagagatctcctttctgccctttcttgttccccaaaatgtgttgccttcatggtgaaaatttattttggcagattttctcttctttgataaaagcagccaacactttgttaaaagtctgtgaaacttatttacatgaagtatgtaaaggtaagaaaaaaacattatcaacaagaaatggagaaagccagcagctgaggacagaaaagtcatgcacagtgtcagtgtctatggaaacaggccacttggaccttgaggactaggtatttggaattggaggtgagcttggcctggtgagtctctaaccacttgtgtgtaggatcagtgtgagaaccctgctagaatatagtggcagagatgcaaggggaaatcattggagaagttaccagggaatgatgagctaatctgaaaaaaatacatgtttctaagttgggcgtggtagctcatctgtagtcccagctacttgagagcctgaggcaggaggatcgcttgagcccagcctgggcagcacagcgagaccctatctccctaaaaaaaactttttcgttgtttagttttgggatttttttttttcctggtcttttttccccctttttgtgaataacgggatctcactatgttgcccaggcagatctcgaactcctgggcccaagcaatcctcctgcctctgccttcctaagattacaggtatgagccactgtgttaagcaaaaaaacttttttaaatgaaaatcattttttaaaagacaggctttccaggggagggtattattccacttatatgaagtgtcaacagtaggcagatttgtggagacaaatagattagtggttaccaggggctgagaggagtgggagtggggagcaactgcttaatgggtaaagggttgtctttggaactagagagtagtgatggtcgcatgacattgtgaatgtactaaatgctattaatgataaattttatgttatgtgtattttaccacaattaaaaaaaaaagatcaaatgtcctcagaatagccaacaaccttccacttggctaaatgcctactcattaaacttcttgaactaaattcctttctgattgtcatggttattgtgtcctgggcttcagagtttcacattcaggttggcttggtccagtctgtcatgtatcactataggtccccacattggcctcttcctcagacggacagcccatctatctgccggggctctgtgccacagccagatagacttgctctgagacagctgtgtgggctctgagcactggccaggcatcacaaaacctatctttatgatttagaataattggtggtcagctgctgttttaatgttgttgttttttttaatttagatataattcacataccatgaaatttactcatttaaagtgtacaattcattcttcagtataattcataggctcacagaaaaaattgtttaaaaataaaatgtgcaattcagtgtcttttagtacattcacagagttgtgcaaccatcgcctctgtgtcattccagaacactttcagcacccaaaagaaaccccagacacaggagcagtcacctcttattacccgcagcccctggcaacaactcatccacttcctgtctctatggatttgcctattctggacatttcctataaatggaattatgcactatttggccttttgtgtctggcctctttcactgagcgtaatgtcctcaaggttcatctgcattgtagcatgtgtcagaatttctttcctttttgaggctgaatgatattatatcctatagataatgaggttttgattatccacccatcccttgggaatgcatatttgggttgcccccaccatttggctgttgtaaactgtgctgccatgaacactggtgtacggatatctgtttggttactggttttggttttttgtttgtttgttttggttttttgagacaaggtcttgctctgtcgcccaggctggattacagtggcacgatctctgctcactgcaacctccacctcccaggttcaagcaattctcctgcctcagtctcctgagtagctgggactacaggtagcactcaccaccatgcccggctaaatttttttgtatttttagtagagacaaggtttcgccatattggccaggctggtctcaaactcctgacctcaggtgatccacccacctcagcctcccaaagtgctgggattacagacgtgagccaccgcacccggcatagttgtggctttttgagagtgtatggctaggagtaaaattgccaggtcatatggtaactccatgtttaacatttgagaaactgccaaactgttctccacagcaggaattttttaacctgtatgtggtgggcttgtgtttcggttttcattttacacatctataaagatgagatttgctgtatggcactggttgcctgtatttggggagggttctgcttttggttggcaagaactgcattttatttaagcttagcaaaacataactggtttctcgcatcttctcaaaagtggaggattaagaaatggactgcgaattcagagcagggcagctgaacctcaggctccacccttgtagccttcaagctgaacctcattctctcttgctccctggagaccactgagacactctgcctgtgccagtttgatttctcacatttttaaagggccaaagcttgtgtctcaaagtgctatagcctttattgattcatgcagagaagcctccttgattccgtaattctgcagctaatactggaagtagaaagaattggaaacaccatctggatgacactttagggtggaagcagccagtacaagggggggctcattatttcctctggtcccagactgttcacctggagctgtagccaccaccctgcccttaggttaactgcctcgagtggtagtttagctctttgtgctgtgccgagggataactggaagtgaaaggtgctgagaaatgccatctcctgaaagtggcgagcatgagtgaatttacgaaaggttgggatattgctggggctctggaagtttctctggagctcactccaggggacagggagggggctggattccaattcaagtgaaaaatacctttcatctgccttgttcacctggcttttttgcctttttgtaaaatctgaaaacctcagggattgagtagtctttccttaactgcagttgcctgtctggccacacctgccagctgttgcttgtacccctgtaatttgcacggccttccgggcctttctcacaagatcactgcaggtcacattcatgaggaaaatgcaggcagttcctgccatcagacccctcaggatgtcatggtttggcctgaaaacaagattcctgcaactctaattttcctttgctagatcaaatgaaggatttgatctaatgtttgcattctagcagcaaaatcattgaatattttatttcttaagagccttacttcatattttgtaggtattttaagattttgtaaaggcctttctgcttcaacgtgtgatgtgtgcattcttagaaaaagatcttgtgttctgtaaatcacacaataaaaacatgagttcgtgcaggaaaaactggggcggggtggatcactccaaacttgtgtggtgtggtaactggagctcactgatgaaaccatgaacagttctggctgaaagaaccccacagtacactgaggtctgttggcatcgccgccagcaccgccccggtccctttgtgcgcgccaccacacctggctaattttttatttttagtagagagggggtttcaccatgttggtcaggatggcctcgaactgacctcgtgatccgcccacctcagcctcccaaagtgctgggattacaggtgtgagcctccgtgcccagccttcagctttttttcttaatgtctttgtgtaatatgaaggcattctctttaattgttaaaaagcttgcctaccactgcttcaaaatattactgtcagttggcatagcttctgattatattgatgtcatctcccttcttttaaacatgttaccatattggcactgtatttcccctagcccattgatcacttgagagttagtcatagtcctcgtgctgtttcactcctaaacgtttaagcatgcctttcctaagagcagacagtacagttaagacactcaggaagtttagcaatgagctaacacagaaccttacatttctccacataccccataaatgccttttttagagcctttgagcctggaatgcagagtccaggactgtgtgttgtattcgattgtgtcatcccttcagtctcctttatcagaaatgttcccccacccccttgttttctctcatcatcttgagtccagaccgtggttgcatggcacgccctctctggactcttcctgctgtctcctcacggtaagcttcagtctcctactcgtgatgctggttcatctcagcagcactgaggggcctgagctcagtttggtcgtgtgttaaggtggtgcctgccagatttctccacagaaaagggccccgtacttttatttgctcttcagcctgtgtattccttcctttcttgccagcttgtgggtggcttctctagcagcttctgtaagatactcagtttggcagttgtagttgtttcagcaggagaggtgtctgcatacctgaccaccacatggctagaagtcgatccatcctctggcgtaaccatcctccatgctactgtccctggggcactgaggccctcctcagtgacttcctccacctcatcttccgccatctccaagccaccagtgtccaacggactactgatatgtcccaaactcatcatttgtttattcaccaattcagagcccacctttttttcagcactgagctagcctctccttgctagaagcttacggtcgaaggtctccagccatcagaagaagcacgtggagcgctgcgtccgtgttgtggttattcatccagcatgtgttgagtaagggttgcacctgtgcctggcattatgcattgagcggggagatgggggttggcacgcacagtggggtgttctaagtacactgagggctcgggtgccctggctcatagagcagggagggaggcaggagcagggaaggtgtctcagaagtgccatctttttttttttttttttgggaagtggaatcttgttctatcgcctggtctggagtgcaatggcactatctcaactcactgcagcctccgcctcccaggttcaagcgattctcatgcctcagtccccgagtagctgggaccacaggcgcacaccaccacacccggcaaatattttgtatttttagtagaggcggagttttgccatgttggccaggctggtcttaaactcctggcctcaagtgatctgctcacctcggcctcctaaggtgttgggattacaggcatgagccactgcgcccggtctagaagtgccatcctaactgaacctgaaagatgaaagttctccagatgaacctgaaagttctccaaatgaaaaggtgggagggggtgacagggttaggcccagagcctctggtgacacagggtgggcatcattggtcactttttcctcgagggaggggcgtcacacgggtgatagggtgggagctataaccatgttgatagtgccgcctctgcccatctggcctggcatgccctgagccctctgtcccacctgtggaactcataagccctgacagcccactcactcctgattcattatccacacccctgtgcttccgctgtgcctggagcaagctttcttcagggggaagggaggctggaactatgttgtagttacctatttgtcctcccttccaaactgtgagttcttggaggtggaaggatgctgcaggatctggctcaggacgaaggcagttggtgaacagacacgtgtgtttttgactcacggtgatctcagacaagttcctctgtctagtcgaacttctttttttccatctgtaacactcaggagttgaataggtggtttttctgaggatacttcaactgtaaaatgtatgaacttgtgaactagctatttagttctcctcataatcaagattgtgtgtgtgtggggggttctgattagagggaggatgaagagaggtgtatggggttttttttgttttgttttctgtttgtttgtttgtttttgagatggagtctcactctgtcacccaggctggagtgcagtggcacgatttcggttcactgcaacctctgcctcctgggttcaagtgattctcctgcctcagcctcctgagtaactgggattacaggcatgcaccaccatgcccagctaatttttgtatttttaatagagatggggttttcgccatgttggccaggctggtctcgaactcctgacctcaggtgatccacctgcctcggcctcccaaagtgctgggattataggcatgagccaccacacctggcaggtttctttgaaaaagtttgtgtttcggcaaacaccataaaccccctgggggacagccttggggagtcacctggcaccctagcccagcctccctcccttgggtcctgcagtgaaggcttagtgagggtgtgcaaatgcccaggtcaccctgggactgggcaggccctctgggctaagggtaaactcatttggaatacctgttttctatcattgttttttatttgttaaatttaaagggtacaagtgcagttttgttgcgtggatatattgtatagtagtgaagtctgagctttcagtgtaaccatcacctgaatagtggacattgtacccgttaagtaatgtctcatccctcaccccctcccacccttcccagtctctccagtgtctgccattcctcactctgtccatgtgcacatgctattcagctcctgcttctaagtgagaacgtacggtatttgactttctgtgtctgagctgtgtcactgaagacaatggactccagctccatccacgttttttatcatttttacctgcactccacacccagcacaatccaggcttctttgtgggttttttgaaatttgtctttaattataaaagtagcagccagcaaattaacaaacacccatgtgcctttcattgcacagaattgaaaatcatcatactatatttgcttcaagtaatttccattagaaagaactagaatattacagtagagttaaagaccctttatttcccatcttcagtgctcttaaaagttcatttagggccaggcatggtggctcacacctataatcccagcactttgagaggcccaggtgggtggatcacctgaggtcaggagttcaagaccagcctggccaacatggcgaaaccccatctctactaaaaatacaaaaattagctgggcgtggtggtgcgcatctgtaatctcagctactcgggaggctgaggcaggagaatcgcttgaactcaggagggaggcagagcctgtatgcagtaagccgagattgcgccaccacaccccagcatgggtgacagagcaagactccgtctcaaaaaaaaaaaaaaaaaagttcattcattgtacacttagaaatagttaaaaaggtaaactttgttttgtgtgtgtgtgtatatatatatatatatatatatatatatatatatatatatatgtatttttttttgagacatatatgtgtctggtttgttcgcccaggcaggagtgcagtggcatgatcaacggctcactgcagcctcaacttcctaggctcaagtgatcctcctgcctcagcctcccgagtagctaggattacaggcacacaccaccatgcccagctaattttttttttttttttttttttttgtagagacagggttttgctatgttgcccaggctggtctcaaactcctgagctcaagcgatccacctgcctcacctcccaaagtgctgggattacaagtgtaagccaccacacctgacctgttttgtatattttaccacaataaaaagcctttaaaaccccaagcagacagttcattttcattcaggcccaactcagaatctgatcacagcggggtttcccccctttctagcgagtagctgaagaactgttttctctccttgatggtataactgtctctgtgggtgttgctcccctgccgctccagtggttttgtttttgtttttgtttttttgagacggagtcttgcgatctcagctcactgcgacctctgcctcctgggttcaggcgattcttctccctcagccttccatgtagctgggacttacaggcacctgccaccacgcccggctcatttttgtatttttagtagagacggagtttcaccatgttggccaggttgggctcgaactccagacctcaggtgatccacctgcctcagcctcccacagtgctgggattacaggtgagagccactgcacccagccggcccctcagtcttttccttctcaatcagtggcaccaccatcttcccaggctttggacatggtccctgactcacccttgcccctcacccccacactaatccacctgcgagctctgttgcttcaccacctagaccagccccaaatcctcaactgcccccaccctgggccacacctggaccactgctagaggcctctcatgggccctccctgtttttctcttgcactccccgggctttctggcacaagatgccccagaagcagaatcacatatctctcctgggagccaatctagtgtgtttactgcccctggagtgttattgttggccttagaatatgtcccactacaggtttgcagagcactgtagtcaaaagtcatttgaaataaatcttttctctgtggtatattgtcaatttgatatagaattaaatttgtttcttttcttttttcttttctttttttttttttttaagagacagggtcttggccaggcgtggtgtctcatgcctgtaatcccggcactttgggaagccaaggtgggtggatcgcctgaggtcaggaattcaagaccaacctggccagcatggtgaaaccccgtctctgctaaaaatacaaaaattagccgggcgtgatggcaggtacctgtaatcccagctactcgggaagctgaggcaggagaaggcttgaactcaggagtcggaggttgcagtgagccaagatcacgccatggcactctagcaagactctgtctcaaaaaaaaaaaaagagagagagagagacagggtcttgctctgtcactcaggctggagtgcagtgatgtagtcatggctcactgcagcctcatactcctgacctcaggtgatcgacccgcctcggcctcccaaagtgctgggatcgtaggctgaagccaccatgcctggcccgaactcatttgtttttatttgcattaagtgtaataaggttttgttacttttagtttgaattttattttgggtaatataaacatttacatgattcagaagtcagaattacactgaggcatgttcagctaggcctcactcctgtgcctgtacccttacctttttccccctaccccatgcagggaatcaatttcattagttcctggtgtgtccttccttaatacccccccttctttctttggtagaatgcagtagatatgtttgcgctttgctccctttgcttcacagtggatcctggaaatgactccatcgcagttcttagagctcttgtttagtccctttggatctgcacagtactccagtgtgtgggcgcaccataagtttattcagcaagtgccctggtgatagggatcgggggtattggaagcctttggctggtaaaaataatgttgtagcaaataacatcatgcatatgttctttgagatttctggaggtgtctctttagcatagatttctagaaggcattccttacgtcacgtttaggtttatagtttgacctcatggtgattaaggtatttgggaaatgcaaatgagagtttcgaagaagccagatctttcccattagttcactgtttttctctgacattaggaccgtccgggttctagggagcagccctggcgttaggcagtgccatgatggattgtgtagaagtagcgattcccatctgtctgctttcttggcccactctgctggtggctccccttccctccctcctttatggggagctggggagctgcctaggggtccattctcaaaggctgatctctggtgggcaacaggccacacctagctttccagggttcttcgtcatttcccattgagagctgtaagactcagagacatgaaaaggaagctctggctgggcacggtggctcacgcctgtaatcccagcactttgggaggctgaggcgggtcgatcacctgaggtcaggagttcgagaccagcctgcccaacatggtgaaaccccgtctccactaaacatacaaaaattagcctggcgtggtagcacacgcctgtgatcccagctactccggaggctgaggcaggagaataacttgaacccggcaggcggaggttgcgatgagccgatattatgccatcggcaacagagcgagactccatctcaaaaaaaaaacaaaaaacaaaacaaggcgagctctgtgctgggacagattagggacccctctttacagcaagaaagactgctctgtgggttgtaggatgcctttgtgtatgcagtggctctaggtgactctggcagccacactctgggccctaaacttctggaggaagatacaggatagggaggaactcaggggtgagtcatggtggggacaagacattccctcactctaagaccttgtcactagattggaacatctcttgcctccctacacctgacctgatggttctggagagatacgtccttgcagcttctgagtcccagcactaagcagcctttggtaacttccctacatcatttgagttctggtttcctaaggatgcttgccagtgagtgccatggtgccctcattgcacagtctgtgcagtgtagacaagaggggaagtctcttggggtagaccagccgcaaggcggtgactagcactgatgtgaaccacatgggacaggggagttgtggggctgagaacacggagggtgggagtagtcatgctcttttccagaatgaactgctaacgaagggactcgcaggtggctgctgcttctttccaagctgcccctgttgttgcagaggctctggagtcctaggaggtttcacggtggcatactcgacagagtactagagcatcatggccagatagtgatgctggggtgtggggcctcacggtggccatttctgacgagaccccaccgggccaaagtgatgtgtagagaaggagctgcttcggtcaccagaaaagaacggggaagcctcccacactagaataggtagggtgctcttctccaccggcaggaaggggatgtatggctctgcctggaccacacctttttccttgctcttccctccgcatctgctgtggccgaggccattcctcatcagggaacatgtgttagaggctcacgccacctgggaccacttgtcttatcacccccaggaccctaggcggtagtttcctgtggcctgagttagctgatatttatatagtgccattgtgccttttctcctgtgatgctcacagtaaggatgcctagatggggttacctgttgtcaagataaggaaactgaagcacagaatgctgaggtcatttgctgggttcatgtttggaaagcggcaaaggatttcagtgcaggttggctggctccaaacctgtgtgtgctttccatgacactgtactgtgtgcctcattgagcctcattctagaaaaccaaaaacacacccaaggcccggccttcacaaaggagacccctcccccatttggctccctttccagcagtcgacggcctcttgtcagccatcgagcccagagtcccttgaagtgcgactcatgctggggtggtatgctcaggagccgcagtgtttccgctcagaggaaagggctctgattctcctgcagtgctaggagacttgtgggtggccacagtgcaggtcaggcacaccggccagcaccacccacagcccaaattcctaaagaaatatttgggtcccagcttggcccgagtctctgttgtcctggggaaggacatcaagatctgagtgtatgatggcctggggccttgcatgtggtgggggtccaagcctgcctctgctcacttgttctgcagactggcatgttctctgtgatacttacatacttgtttaacacttcagggaagaaaagtcagaagaccaggacctccagggcctcaaggacaaacccctcaagtttaaaaaggtgaagaaagataagaaagaagagaaagagggcaagcatgagcccgtgcagccatcagcccaccactctgctgagcccgcagaggcaggcaaagcagagacatcagaagggtcaggctccgccccggctgtgccggaagcttctgcctcccccaaacagcggcgctccatcatccgtgaccggggacccatgtatgatgaccccaccctgcctgaaggctggacacggaagcttaagcaaaggaaatctggccgctctgctgggaagtatgatgtgtatttgatcaagtaagtaagagcaactcctatctctacagggcagggagggcagggacaaggatccctcatggagcaggaaaatgtatgtgcccagggtggggtcggggggaacataaacaatgaacactgagaccaggtgtgcttgaaatgaccgtgtacagaggtcgctgccctgagtgggaagttctcaaggtagcaggccctctatcctctccacacctcaagtctttatctggggatggaatagctgcggaagcagaggaacttgcagagctaggggttcagaggggtgaagaagcatgtttcagttctgccttttaaatgatcccaaaaaggttagcagttttcaaatgacatttgcagacagcctcatttaattccatgagaagggtgagcaaaggattatcttgttgaaactgattcctggagagactgagcaccgtacctgagttcaaacttgggaatgttctagatggtgactcaggcccaggcaccaaccagcagaatgggcctcagcctgacaacccttctgtaccaggcctgactctttggttgctgaactttggagaggcctgggggggtcagcggcaggcagacgagtgagtggctttggtgacaggtcctcaggggcagccaggcagtgtgactctcgttcaatagtaacgtttgtcagagcgttgtcaccaccatccgctctgccctatctctgacattgctatggagagcctctaattgttccttgtgtctttctgtttgtccccacagtccccagggaaaagcctttcgctctaaagtggagttgattgcgtacttcgaaaaggtaggcgacacatccctggaccctaatgattttgacttcacggtaactgggagagggagcccctcccggcgagagcagaaaccacctaagaagcccaaatctcccaaagctccaggaactggcagaggccggggacgccccaaagggagcggcaccacgagacccaaggcggccacgtcagagggtgtgcaggtgaaaagggtcctggagaaaagtcctgggaagctccttgtcaagatgccttttcaaacttcgccagggggcaaggctgaggggggtggggccaccacatccacccaggtcatggtgatcaaacgccccggcaggaagcgaaaagctgaggccgaccctcaggccattcccaagaaacggggccgaaagccggggagtgtggtggcagccgctgccgccgaggccaaaaagaaagccgtgaaggagtcttctatccgatctgtgcaggagaccgtactccccatcaagaagcgcaagacccgggagacggtcagcatcgaggtcaaggaagtggtgaagcccctgctggtgtccaccctcggtgagaagagcgggaaaggactgaagacctgtaagagccctgggcggaaaagcaaggagagcagccccaaggggcgcagcagcagcgcctcctcaccccccaagaaggagcaccaccaccatcaccaccactcagagtccccaaaggcccccgtgccactgctcccacccctgcccccacctccacctgagcccgagagctccgaggaccccaccagcccccctgagccccaggacttgagcagcagcgtctgcaaagaggagaagatgcccagaggaggctcactggagagcgacggctgccccaaggagccagctaagactcagcccgcggttgccaccgccgccacggccgcagaaaagtacaaacaccgaggggagggagagcgcaaagacattgtttcatcctccatgccaaggccaaacagagaggagcctgtggacagccggacgcccgtgaccgagagagttagctgactttacacggagcggattgcaaagcaaaccaacaagaataaaggcagctgttgtctcttctccttatgggtagggctctgacaaagcttcccgattaactgaaataaaaaatatttttttttctttcagtaaacttagagtttcgtggcttcagggtgggagtagttggagcattggggatgtttttcttaccgacaagcacagtcaggttgaagacctaaccagggccagaagtagctttgcacttttctaaactaggctccttcaacaaggcttgctgcagatactactgaccagacaagctgttgaccaggcacctcccctcccgcccaaacctttcccccatgtggtcgttagagacagagcgacagagcagttgagaggacactcccgttttcggtgccatcagtgccccgtctacagctcccccagctccccccacctcccccactcccaaccacgttgggacagggaggtgtgaggcaggagagacagttggattctttagagaagatggatatgaccagtggctatggcctgtgcgatcccacccgtggtggctcaagtctggccccacaccagccccaatccaaaactggcaaggacgcttcacaggacaggaaagtggcacctgtctgctccagctctggcatggctaggaggggggagtcccttgaactactgggtgtagactggcctgaaccacaggagaggatggcccagggtgaggtggcatggtccattctcaagggacgtcctccaacgggtggcgctagaggccatggaggcagtaggacaaggtgcaggcaggctggcctggggtcaggccgggcagagcacagcggggtgagagggattcctaatcactcagagcagtctgtgacttagtggacaggggagggggcaaagggggaggagaagaaaatgttcttccagttactttccaattctcctttagggacagcttagaattatttgcactattgagtcttcatgttcccacttcaaaacaaacagatgctctgagagcaaactggcttgaattggtgacatttagtccctcaagccaccagatgtgacagtgttgagaactacctggatttgtatatatacctgcgcttgttttaaagtgggctcagcacatagggttcccacgaagctccgaaactctaagtgtttgctgcaattttataaggacttcctgattggtttctcttctccccttccatttctgccttttgttcatttcatcctttcacttctttcccttcctccatcctcctccttcctagttcatcccttctcttccaggcagccgcggtgcccaaccacacttgtcggctccagtccccagaactctgcctgccctttgtcctcctgctgccagtaccagccccaccctgttttgagccctgaggaggccttgggctctgctgagtccgacctggcctgtctgtgaagagcaagagagcagcaaggtcttgctctcctaggtagccccctcttccctggtaagaaaaagcaaaaggcatttcccaccctgaacaacgagccttttcacccttctactctagagaagtggactggaggagctgggcccgatttggtagttgaggaaagcacagaggcctcctgtggcctgccagtcatcgagtggcccaacaggggctccatgccagccgaccttgacctcactcagaagtccagagtctagcgtagtgcagcagggcagtagcggtaccaatgcagaactcccaagacccgagctgggaccagtacctgggtccccagcccttcctctgctcccccttttccctcggagttcttcttgaatggcaatgttttgcttttgctcgatgcagacagggggccagaacaccacacatttcactgtctgtctggtccatagctgtggtgtaggggcttagaggcatgggcttgctgtgggtttttaattgatcagttttcatgtgggatcccatctttttaacctctgttcaggaagtccttatctagctgcatatcttcatcatattggtatatccttttctgtgtttacagagatgtctcttatatctaaatctgtccaactgagaagtaccttatcaaagtagcaaatgagacagcagtcttatgcttccagaaacacccacaggcatgtcccatgtgagctgctgccatgaactgtcaagtgtgtgttgtcttgtgtatttcagttattgtccctggcttccttactatggtgtaatcatgaaggagtgaaacatcatagaaactgtctagcacttccttgccagtctttagtgatcaggaaccatagttgacagttccaatcagtagcttaagaaaaaaccgtgtttgtctcttctggaatggttagaagtgagggagtttgccccgttctgtttgtagagtctcatagttggactttctagcatatatgtgtccatttccttatgctgtaaaagcaagtcctgcaaccaaactcccatcagcccaatccctgatccctgatcccttccacctgctctgctgatgacccccccagcttcacttctgactcttccccaggaagggaaggggggtcagaagagagggtgagtcctccagaactcttcctccaaggacagaaggctcctgcccccatagtggcctcgaactcctggcactaccaaaggacacttatccacgagagcgcagcatccgaccaggttgtcactgagaagatgtttattttggtcagttgggtttttatgtattatacttagtcaaatgtaatgtggcttctggaatcattgtccagagctgcttccccgtcacctgggcgtcatctggtcctggtaagaggagtgcgtggcccaccaggcccccctgtcacccatgacagttcattcagggccgatggggcagtcgtggttgggaacacagcatttcaagcgtcactttatttcattcgggccccacctgcagctccctcaaagaggcagttgcccagcctctttcccttccagtttattccagagctgccagtggggcctgaggctccttagggttttctctctatttccccctttcttcctcattccctcgtctttcccaaaggcatcacgagtcagtcgcctttcagcaggcagccttggcggtttatcgccctggcaggcaggggccctgcagctctcatgctgcccctgccttggggtcaggttgacaggaggttggagggaaagccttaagctgcaggattctcaccagctgtgtccggcccagttttggggtgtgacctcaatttcaattttgtctgtacttgaacattatgaagatgggggcctctttcagtgaatttgtgaacagcagaattgaccgacagctttccagtacccatggggctaggtcattaaggccacatccacagtctcccccacccttgttccagttgttagttactacctcctctcctgacaatactgtatgtcgtcgagctccccccaggtctacccctcccggccctgcctgctggtgggcttgtcatagccagtgggattgccggtcttgacagctcagtgagctggagatacttggtcacagccaggcgctagcacagctcccttctgttgatgctgtattcccatatcaaaagacacaggggacacccagaaacgccacatcccccaatccatcagtgccaaactagccaacggccccagcttctcagctcgctggatggcggaagctgctactcgtgagcgccagtgcgggtgcagacaatcttctgttgggtggcatcattccaggcccgaagcatgaacagtgcacctgggacagggagcagccccaaattgtcacctgcttctctgcccagcttttcattgctgtgacagtgatggcgaaagagggtaataaccagacacaaactgccaagttgggtggagaaaggagtttctttagctgacagaatctctgaattttaaatcacttagtaagcggctcaagcccaggagggagcagagggatacgagcggagtcccctgcgcgggaccatctggaattggtttagcccaagtggagcctgacagccagaactctgtgtcccccgtctaaccacagctccttttccagagcattccagtcaggctctctgggctgactgggccaggggaggttacaggtaccagttctttaagaagatctttgggcatatacatttttagcctgtgtcattgccccaaatggattcctgtttcaagttcacacctgcagattctaggacctgtgtcctagacttcagggagtcagctgtttctagagttcctaccatggagtgggtctggaggacctgcccggtgggggggcagagccctgctccctccgggtcttcctactcttctctctgctctgacgggatttgttgattctctccattttggtgtctttctcttttagatattgtatcaatctttagaaaaggcatagtctacttgttataaatcgttaggatactgcctcccccagggtctaaaattacatattagaggggaaaagctgaacactgaagtcagttctcaacaatttagaaggaaaacctagaaaacatttggcagaaaattacatttcgatgtttttgaatgaatacgagcaagcttttacaacagtgctgatctaaaaatacttagcacttggcctgagatgcctggtgagcattacaggcaaggggaatctggaggtagccgacctgaggacatggcttctgaacctgtcttttgggagtggtatggaaggtggagcgttcaccagtgacctggaaggcccagcaccaccctccttcccactcttctcatcttgacagagcctgccccagcgctgacgtgtcaggaaaacacccagggaactaggaaggcacttctgcctgaggggcagcctgccttgcccactcctgctctgctcgcctcggatcagctgagccttctgagctggcctctcactgcctccccaaggccccctgcctgccctgtcaggaggcagaaggaagcaggtgtgagggcagtgcaaggagggagcacaacccccagctcccgctccgggctccgacttgtgcacaggcagagcccagaccctggaggaaatcctacctttgaattcaagaacatttggggaatttggaaatctctttgcccccaaacccccattctgtcctacctttaatcaggtcctgctcagcagtgagagcagatgaggtgaaaaggccaagaggtttggctcctgcccactgatagcccctctccccgcagtgtttgtgtgtcaagtggcaaagctgttcttcctggtgaccctgattatatccagtaacacatagactgtgcgcataggcctgctttgtctcctctatcctgggcttttgttttgctttttagttttgcttttagtttttctgtcccttttatttaacgcaccgactagacacacaaagcagttgaatttttatatatatatctgtatattgcacaattataaactcattttgcttgtggctccacacacacaaaaaaagacctgttaaaattatacctgttgcttaattacaatatttctgataaccatagcataggacaagggaaaataaaaaaagaaaaaaaagaaaaaaaaacgacaaatctgtctgctggtcacttcttctgtccaagcagattcgtggtcttttcctcgcttctttcaagggctttcctgtgccaggtgaaggaggctccaggcagcacccaggttttgcactcttgtttctcccgtgcttgtgaaagaggtcccaaggttctgggtgcaggagcgctcccttgacctgctgaagtccggaacgtagtcggcacagcctggtcgccttccacctctgggagctggagtccactggggtggcctgactcccccagtccccttcccgtgacctggtcagggtgagcccatgtggagtcagcctcgcaggcctccctgccagtagggtccgagtgtgtttcatccttcccactctgtcgagcctgggggctggagcggagacgggaggcctggcctgtctcggaacctgtgagctgcaccaggtagaacgccagggaccccagaatcatgtgcgtcagtccaaggggtcccctccaggagtagtgaagactccagaaatgtccctttcttctcccccatcctacgagtaattgcatttgcttttgtaattcttaatgagcaatatctgctagagagtttagctgtaacagttctttttgatcatctttttttaataattagaaacaccaaaaaaatccagaaacttgttcttccaaagcagagagcattataatcaccagggccaaaagcttccctccctgctgtcattgcttcttctgaggcctgaatccaaaagaaaaacagccataggccctttcagtggccgggctacccgtgagcccttcggaggaccagggctggggcagcctctgggcccacatccggggccagctccggcgtgtgttcagtgttagcagtgggtcatgatgctctttcccacccagcctgggataggggcagaggaggcgaggaggccgttgccgctgatgtttggccgtgaacaggtgggtgtctgcgtgcgtccacgtgcgtgttttctgactgacatgaaatcgacgcccgagttagcctcacccggtgacctctagccctgcccggatggagcggggcccacccggttcagtgtttctggggagctggacagtggagtgcaaaaggcttgcagaacttgaagcctgctccttcccttgctaccacggcctcctttccgtttgatttgtcactgcttcaatcaataacagccgctccagagtcagtagtcaatgaatatatgaccaaatatcaccaggactgttactcaatgtgtgccgagcccttgcccatgctgggctcccgtgtatctggacactgtaacgtgtgctgtgtttgctccccttccccttccttctttgccctttacttgtctttctggggtttttctgtttgggtttggtttggtttttatttctccttttgtgttccaaacatgaggttctctctactggtcctcttaactgtggtgttgaggcttatatttgtgtaatttttggtgggtgaaaggaattttgctaagtaaatctcttctgtgtttgaactgaagtctgtattgtaactatgtttaaagtaattgttccagagacaaatatttctagacactttttctttacaaacaaaagcattcggagggagggggatggtgactgagatgagaggggagagctgaacagatgacccctgcccagatcagccagaagccacccaaagcagtggagcccaggagtcccactccaagccagcaagccgaatagctgatgtgttgccactttccaagtcactgcaaaaccaggttttgttccgcccagtggattcttgttttgcttcccctccccccgagattattaccaccatcccgtgcttttaaggaaaggcaagattgatgtttccttgaggggagccaggaggggatgtgtgtgtgcagagctgaagagctggggagaatggggctgggcccacccaagcaggaggctgggacgctctgctgtgggcacaggtcaggctaatgttggcagatgcagctcttcctggacaggccaggtggtgggcattctctctccaaggtgtgccccgtgggcattactgtttaagacacttccgtcacatcccaccccatcctccagggctcaacactgtgacatctctattccccaccctccccttcccagggcaataaaatgaccatggagggggcttgcactctcttggctgtcacccgatcgccagcaaaacttagatgtgagaaaaccccttcccattccatggcgaaaacatctccttagaaaagccattaccctcattaggcatggttttgggctcccaaaacacctgacagcccctccctcctctgagaggcggagagtgctgactgtagtgaccattgcatgccgggtgcagcatctggaagagctaggcagggtgtctgccccctcctgagttgaagtcatgctcccctgtgccagcccagaggccgagagctatggacagcattgccagtaacacaggccaccctgtgcagaagggagctggctccagcctggaaacctgtctgaggttgggagaggtgcacttggggcacagggagaggccgggacacacttagctggagatgtctctaaaagccctgtatcgtattcaccttcagtttttgtgttttgggacaattactttagaaaataagtaggtcgttttaaaaacaaaaattattgattgcttttttgtagtgttcagaaaaaaggttctttgtgtatagccaaatgactgaaagcactgatatatttaaaaacaaaaggcaatttattaaggaaatttgtaccatttcagtaaacctgtctgaatgtacctgtatacgtttcaaaaacaccccccccccactgaatccctgtaacctatttattatataaagagtttgccttataaatttacataaaaatgtccgtttgtgtcttttgttgtaaaaatcaagtgattttttcataaggttcttttactattggaaaagatgggcagcacgcagttttattttatttttgtaagttttttaatacatgtgaaagcaaagaatactcagcatgcctttctaagtgacgcgtttgcaccttttgttgggaagtactgtatcctgtgctgttagcattctcgataaatctctctgtgaaagtgactcaaggtctgggctttcattataagacagaagtccccctccagctcacatgacagcatggtgctgcgtttcctcattggatctggctgtccctggacacaggtagctgccttcaggcctgccacgagcggccaagggaagcctcctccatatgctggcctcgctggcccctcagcttcttccaagccagtgctctccaggcacactgctccagcgtgtgacgggaagggcctggcatgagtcagcctgcagcacaacctccctgctccagacccgtatggtaggggcaccccctaggtctggatgtgctgtggtgcttttggacacccccacccccgcaggctgtggctcctcctgtgtctcattctggccaggaccctcacgtgccctctgttgactgctaacgtggttctctgaccaggcaagggcaggctgaggggtttgcccaaagggggcccccttgttactggcttccttggctctcaggagcagcctcaccaggttggtaaggggctggaggagacaactgctcaaaggagtccagcttcacatgcacatgctagaaggtaccctcggaaggcctggccttcaaaggtagatcccagggttgaaaagtcaacttgtatgcattgagcatctcgtatgccagccctgttccgtgagctgatgggcctttgtgtgtaagtaggaccaagtgcccccgtggaggttagcatgggtgtgcagtcatttcagatacttgagttggtacatctcagtaaagtctgtcccgtgagaagccatgggtttcatggtatggttggcatcttccttgggagtggccacagtggtggtggcttcaggaaagagactccaacaggggccagctgtgggccttgggcacttctcgtttctaggaaaagtcctaagtctgtagggctaggggtggggaaccccttcgctgtcaggatcaagagggcaaggggaactgtcgctggaggagacatccagctggagaaacaaaagagtaagtctgcgttgctgcttgtggggtcttccccatctcagggcggggaccgggggtggcggtccagacaagtaatcaaggacgatgcccaggaggggacaggtacggggtggcaggagctctgccggcgggctcaggaagccttcaccacagctgcctgagctcacccttgccaaatgagggctggggcagcagcaacgcatacactcacggctgtggcgggcagcgttctcggcatatttcaggacacctaaggagactgaatggctcaaggctgctgccgtgtgcagggggctagacgtggggcgggcaggcagggctcctggtaacagccctgcaggccgcagtggagagcagggttccggcagggccgcccaggagctttcggaaggcccggccccggcccctttccgagcagcccgggcctccgccctgccctctgtccccaacgccgggagccgccgttcgtcctccagagccccgcccgggcgagcccgggaggccgatcgccgctcgcggaacccgccgggacccgggccctccccggcgcggggcgcccccgtgtgacccagcgcgcggccgcggcgcgcaagatggcggcgggcccgggcaccgccccttccgccccgccgggcgtcgcacgaggccggctcgaaggggaagtgagtcagtgtccgcggacccggccggcccaggcccgcgcccgccgcggccctgagaggccccggcaggtcccggcccggcggcggcagccatggccggggggccgggcccgggggagcccgcagcccccggcgcccagcacttcttgtacgaggtgccgccctgggtcatgtgccgcttctacaaagtgatggacgccctggagcccgccgactggtgccagttcggtgggtggcggcgggctgccggggggcgggaggcgcgcgggctcctggcgccgacgcctgacgccccccgccccgcagccgccctgatcgtgcgcgaccagaccgagctgcggctgtgcgagcgctccgggcagcgcacggccagcgtcctgtggccctggatcaaccgcaacgcccgtgtggccgacctcgtgcacatcctcacgcacctgcagctgctccgtgcgcgggacatcatcacagcctgtgagcgcgggactccgggcaccccacggctgggaggccggcgggccccacggggctcccccacccgggcctcaaccttcctttccttccttggcgtcccagggcaccctcccgccccgcttccgtccccaggcaccactgccccgaggcccagcagcatccctgcacccgccgaggccgaggcctggagcccccggaagttgccatcctcagcctccaccttcctctccccaggtaagagggcccggttgttaggctcggtggacccaaagaagagcccaccttgaccacggccacggctgtagaccctgctgctggtctctgcctgcctctcactggtgtctttatgaagcttttccaggctcccagacccattcagggcctgagctcggcctggtcccaagccctgcttccctgtggcctccaccgccatctccagccccttcttctaccaaggtaggtgtcccctgccccccagggaagattcgagacaaggaggaaggaattcagcctttgatgtagcgcagagccccagtcagccaagctgggtcagctgggaggcagctgtggtggggagagcctggagccttgggcagaagggaagagacagggaccccacctgatccaggctctcttcccacagccaggcccagagagctcagtgtccctcctgcagggagcccgcccctttccgttttgctggcccctctgtgagatttcccggggcacccacaacttctcggaggagctcaagatcggggagggtggctttgggtgcgtgtaccgggcggtgatgaggaacacggtgtatgctgtgaagaggctgaaggaggtgagtgtcgcaccctggcagggaccctggaaggccatcagataaccctcaccacttctccagcctttccccctcgcttccccacacaactccttcagccctcattctggcgtagggtccctggccccttggtggttctgggcctcgggtaggtggcactggtggcccgaaggccttcgcttcgagagcctcacgctgcccgtcttccctgccccttcccccaccgcaccctgggggctgcagaacgctgacctggagtggactgcagtgaagcagagcttcctgaccgaggtggagcagctgtccaggtgaggccagagggggagccacaccaggtcccgtggggcttcagaccgcacaccacaggacctggctcccttgggcacctgaggcctggcaggcccgggcgagctgaggccccagccagggctgcccacccagtctggcctgatggaaagtgctcccctttttcaaacaggtttcgtcacccaaacattgtggactttgctggctactgtgctcagaacggcttctactgcctggtgtacggcttcctgcccaacggctccctggaggaccgtctccactgccaggtaggctcacctggcccggcacgcttcccaggacccaaagcactcctgacacctggctggagccgggcgcggggcctagggctttcagcctgtgtgagtgggtcctgccagcaggccaggcctgcacttccagctccccagcagcacccggctcaggatttggcccacggtggggtcaatttttttttttttttttttttttttttttttgaggtggagtcttgctctgtcatccaggctggagtgcagtggtgtgatctcagctcaccacaacctccacctcccgggttcaggcgatcctcctgccgcagcctcccgagtagctgggactacaggcatgcaccaccacacctgcctaatttttgtatttttagtagagatgaggttttgccacattggccaggctagtctcgaactcctgaccccaggtggtctgcgcgcctcagcctcccaaagtgctgggattacaggcgtgagccaccacgcctggcccgacccaatgttttctatagagctctttcccaggcctctcccctttgcaagcagcgtagctggagggtctcatcagcaagccccggaggcgagggggtctggggctaccagctggaccacctacagctgagggagggcccccttgcctcctcctgcatgctgcgtttggggagagcgggaagaatgccttcaaggacttcccgaccaccagggacaaagggatgagccctgggagccgaagcccagcagattctattgaacgtgtccccagccattgcttaagaagtgcaggtcacggagactttgctcctcgttttccagaagggggaaactgaggcctagagagtgaagtggctgttccaggctgcacggtgacaggtagaaggatggttgggatcaaggaacggccatccagcaacctcccctgtccccctttgccaccccagacccaggcctgcccacctctctcctggcctcagcgactggacatccttctgggtacagcccgggcaattcagtttctacatcaggacagccccagcctcatccatggagacatcaagaggtgaggaggggcccttgagaactgccggggcagggcctgcagcaaggggggccccgcgtcctatcaatgtggggatcaggcatggcctgggacctcaacaccccggcatcgcacaggtgtgggaacgggccaaggatgggccctactgatgagcagaggcccccaggcagctggagcgctcagggcagtgccagcgctttctgtgggcaaggcaccgggctggcagcctcgagtccagccttatctaagccgggcaggtgtaggagctaggaccgggctgacgccactgtcttctctccccaagttccaacgtccttctggatgagaggctgacacccaagctgggagactttggcctggcccggttcagccgctttgccgggtccagccccagccagagcagcatggtggcccggacacagacagtgcggggcaccctggcctacctgcccgaggagtacatcaagacgggaaggctggctgtggacacggacaccttcagctttggggtggtgagccactgacccctctgctggctcagaggaggagaagccacaggcaggcagaggtgggggctgcagagtgcactgcgggccaggggccatctgccaagaccccaggaggctgcagctccagggtccccctccctccgaggccctcctcctcaccctgcacctaactgtgtgtttgtaatttgtcttcaagtgggctctccgagttgcccgagcttcagtcccataacatctggctctgcctttgtccacacccttgtcaggcccaatccatgtccacaccagaggcctcttccctgccaaggccactgccatgctctccctcttccctctctccaggtagtgctagagaccttggctggtcagagggctgtgaagacgcacggtgccaggaccaagtatctggtgagccccttgaggcagggccaggagggacacacagctgctggcagccagcaggcacagccccagtggcggggataactggggcgcagtgcccatggatgcctctgctgccacagtggcctcatttttgaaagtaggcagggctccaaacaacttcgtttaccttgccgaggacaaacctgtctgtcctgcagacactatgggccttgtacagaccccacctgggctgggggcagggggaagggcggtcccagggcactgagacccaagctgcagtggaactcagaggactctggccggagaaaggcggtggtagagaagaagcaggccccgaggaacctcctgggccccagcaggctgcagctgagctctccgcaccgtgcagggcagcctgagctgcctcacggtcttactccactcagtctgcctcaccgtggactgtggtggggccaggagactagagacctgggttttagccccagcctgacagtggccttccagcaaattcctgctcccctgtgggcctgttttcccatatgcaaaacagacttcacagaatgtgctcagccagtaattgcttcactgcttctcctcttgtttggggcggttcctgtgtgctgtggggtctccgtcaggattcagccccgctgagaacccaggagccgggcttgagccctccttcctttcccttccccgtccgtccatccatgcatcctgctgaagaagcgcaccaggctccttgggggtccttggacttccccacttgctccccaccctgcagccaaagtgctcttttcaaaggcccctttgccttttctctgctcttggggtgaaggcccagtcccttatgtggttgaccccccaacgccccaggtccctgggactcggggcgctccctgctgcctgcttcacagccttagtatgtgccgttcgctctgcgagaaaagccaccgcccacccaggtggttcctcctggtctgtctgatttcagaactggagatggcctccggtcctgtttccaccctgggggcgcctctctgcggggcgcctctctctctggggtacctctttgtctgtggggcacctctctgtggggcgctttccttctcggctctgccctctcaggctacttcctgccttcagaccccagctccatggggctctcccccaccaggaagtcagctctgtcaaaccgggtcccagggttctgtttgttcctgtatccctagggcccagagcaccactggcccacagtaggtgtttaataaatctctagaagctactcgggaatctgaggcaggaggatcgcttgagcctgggagttggagaccagcctgggcaacatagcaagataggcatggtggtacacacctgtaatcccagctgctcgggaggccgaggtgggaggatcacgagcctgggaggttgaggctgcactgagccatgattgcaccactgcactccagcctgggtgacagaatgagtccctgtctcagaaaaaaagtaagttgtagaaagaccaagagctgtggcacagtgtctcacacctgtaacaccagcactttgggaggctgaggcgggaggatcacttgagcctacttggagaccagccaggccaacaaagcgagaccccatctcttttttttttttttttttttttatcaaaacccatacgattgagtgacaaggacctgaggactgcagctgcaggtgtggccacctggtagccatactgacagtatttatcccacagaaagacctggtggaagaggaggctgaggaggctggagtggctttgagaagcacccagagcacactgcaagcaggtctggctgcagatgcctgggctgctcccatcgccatgcagatctacaagaagcacctggaccccaggcccgggccctgcccacctgagctgggcctgggcctgggccagctggcctgctgctgcctgcaccgccgggccaaaaggaggcctcctatgacccaggtagccagctgcgcactgggacggggtggccagatagaaagcccgcattccaggccttgctctgtagtgaccccatctcagcacctgctaggtctctctggagtctccacacatttcttgcttgccctttggttctgtttggggcagcgcccctctgaactgaggggccccgggcagtcctgctttgcggagcccagctccgacccccttcacatagagagaaggaaagagctgctgccgcgccccctgctgggcgcactgcactactgcatctgcctttttctgtcccctccctagtaccccacctcttctcctctggtgacagttgaaaatggagaggccccgtttgagggcagcggggcagtgagattcattttgtagaaaagaacgaggccattctcagtccttgcttttggcagccgcgcttctcagcactccctgtgatgggaacagaggggcgaggggcagagcgttcccagctgcagggtatgtcattttagagccctggggcaggtcacggacggcctggagcagccctgtggtttgcccacggggtgaccggccagggctgccatctcaccctgagagtccctcttttccacttgcaggtgtacgagaggctagagaagctgcaggcagtggtggcgggggtgcccgggcattcggaggccgccagctgcatccccccttccccgcaggagaactcctacgtgtccagcactggcagagcccacagtggggctgctccatggcagcccctggcagcgccatcaggagccagtgcccaggcagcagagcagctgcagagaggccccaaccagcccgtggagagtgacgagagcctaggcggcctctctgctgccctgcgctcctggcacttgactccaagctgccctctggacccagcacccctcagggaggccggctgtcctcagggggacacggcaggagaatcgagctgggggagtggcccaggatcccggcccacagccgtggaaggtagctggggagacgggttcccaggagagggaccaaggcctctttgggccaaagcccctgtaagtccccaccccagccttctagaagagaaccagggccaaatgttcagctcactgtgaccttagcaaccctggtttcccctccccaggccacatccttcccaggtggagcttgctctccagccctccccccaccccattcctgaaggctgggaacaaggagggctctgtctggtagcctgagagctgggccctgcccttggacttctctgaggaattcaggcctgaggccagggaggcagggtgctaggctgcgggctggggagccacagcatgaggctaagggagtgccatctccaccccaggactggcccttggcagctctgcatcatcgtcgtcagagccaccgcagattatcatcaaccctgcccgacagaagatggtccagaagctggccctgtacgaggatggggccctggacagcctgcagctgctgtcgtccagctccctcccaggtgctgccgcccaggctggcctctggggtgctcaggcgcatccgtgtcagccccaaagagcagagtgtctgtcccgactgcgctgagggcgtggggcagccgggcaggccactggctctggcgacctctagaagcccagccggccccacatgcctcccttagcaagaccctggcccactccttccctcgcctcctgacagtagcacctcctttagcccgagggtgcctgccccactctgtgctttcaggaaataggaagccccagcaggaattttccatcccaggtactatttgaagaaccactgcttaggaaccctcagctgggcgaggtggctcatgcctataataccagcacttttggaggccaagatgggaggatcacttgagcccaggaggtggaggctacagtgagctgtgatcaagccactgcactccagcctgggagacagttagaccctgtctcaaaaacaaatgaacaaacaaacaaaaaccctcaattcccacgaacgccccaggagataagggagcatggcccaggccttgagccagggcttctggcagtaggggagcctcccccatttgctaagcggactttcctcttccttctgtaggcttgggcctggaacaggacaggcaggggcccgaagaaagtgatgaatttcagagctgatgtgttcacctgggcagatcccccaaatccggaagtcaaagttctcatggtcagaagttctcatggtgcacgagtcctcagcactctgccggcagtgggggtgggggcccatgcccgcgggggagagaaggaggtggccctgctgttctaggctctgtgggcataggcaggcagagtggaaccctgcctccatgccagcatctgggggcaaggaaggctggcatcatccagtgaggaggctggcgcatgttgggaggctgctggctgcacagacccgtgaggggaggagaggggctgctgtgcaggggtgtggagtagggagctggctcccctgagagccatgcagggcgtctgcagcccaggcctctggcagcagctctttgcccatctctttggacagtggccaccctgcacaatggggccgacgaggcctagggccctcctacctgcttacaatttggaaaagtgtggccgggtgcggtggctcacgcctgtaatcccagcactttgggaggccaaggcaggaggatcgctggagcccagtaggtcaagaccagccagggcaacatgatgagaccctgtctctgccaaaaaattttttaaactattagcctggcgtggtagcgcacgcctgtggtcccagctgctggggaggctgaagtaggaggatcatttatgcttgggaggtcgaggctgcagtgagtcatgattgtatgactgcactccagcctgggtgacagagcaagaccctgtttcaaaaagaaaaaccctgggaaaagtgaagtatggctgtaagtctcatggttcagtcctagcaagaagcgagaattctgagatcctccagaaagtcgagcagcacccacctccaacctcgggccagtgtcttcaggctttactggggacctgcgagctggcctaatgtggtggcctgcaagccaggccatccctgggcgccacagacgagctccgagccaggtcaggcttcggaggccacaagctcagcctcaggcccaggcactgattgtggcagaggggccactacccaaggtctagctaggcccaagacctagttacccagacagtgagaagcccctggaaggcagaaaagttgggagcatggcagacagggaagggaaacattttcagggaaaagacatgtatcacatgtcttcagaagcaagtcaggtttcatgtaaccgagtgtcctcttgcgtgtccaaaagtagcccagggctgtagcacaggcttcacagtgattttgtgttcagccgtgagtcacactacatgcccccgtgaagctgggcattggtgacgtccaggttgtccttgagtaataaaaacgtatgttgcaatctcgggctctacttgtggactttgttgcaccgaaagccttgagctttcctgatgccttacacttcagggttcttgagcgtccagggtcttgttactactctgggctggccacacccagcacttcccgtgtcaggtttttcctgatgtagtccatgttttttatgctattctaaatggtatctttgattttctagttcatcatgatattatacagaaatgcaattgatgctgggcacggtggctcacgcctgtgattccagcgctttgggaagctaaggcgggcagatcacttgaggccaggagtttgagaccagcctgggcaacatggcgaaaccccgtctctacaaaaagtacaaaaattagccaggcatggtggtgcatgcctgtagtttgagctactcaggaggctgacccaggaggatagtttgagcccaggacgttgaggctgcagtgagccatgattccaccactgcactccagcccgggcaacagagggagaccttgcctcaaaaaaaaaaaaaaaaaaaaaaaaagcggttgagttttgcatatgaaccgtatattctgtgaccttgtttaaattcttttttttttttctttttttgagatggagttttgctcttgttgcccaggctgcagtgcaatggcgctatctcagctcactgcaacctctgcctcctaggttcaagtgat

SEQ ID NO: 1032 - DNA, 99925 bp, Homo sapiens
atcacttgaacctaggaggcagaggttgcagtgagctgagatagcgccattgcactgcagcctgggcaacaagagcaaaactccatctcaaaaaaagaaaaaaaaaaaagaatttaaacaaggtcacagaatatacggttcatatgcaaaactcaaccgctttttttttttttttttttttttttgaggcaaggtctccctctgttgcccgggctggagtgcagtggtggaatcatggctcactgcagcctcaacgtcctgggctcaaactatcctcctgggtcagcctcctgagtagctcaaactacaggcatgcaccaccatgcctggctaatttttgtactttttgtagagacggggtttcgccatgttgcccaggctggtctcaaactcctggcctcaagtgatctgcccgccttagcttcccaaagcgctggaatcacaggcgtgagccaccgtgcccagcatcaattgcatttctgtataatatcatgatgaactagaaaatcaaagataccatttagaatagcataaaaaacatggactacatcaggaaaaacctgacacgggaagtgctgggtgtggccagcccagagtagtaacaagaccctggacgctcaagaaccctgaagtgtaaggcatcaggaaagctcaaggctttcggtgcaacaaagtccacaagtagagcccgagattgcaacatacgtttttattactcaaggacaacctggacgtcaccaatgcccagcttcacgggggcatgtagtgtgactcacggctgaacacaaaatcactgtgaagcctgtgctacagccctgggctacttttggacacgcaagaggacactcggttacatgaaacctgacttgcttctgaagacatgtgatacatgtcttttccctgaaaatgtttcccttccctgtctgccatgctcccaacttttctgccttccaggggcttctcactgtctgggtaactaggtcttgggcctagctagaccttgggtagtggcccctctgccacaatcagtgcctgggcctgaggctgagcttgtggcctccgaagcctgacctggctcggagctcgtctgtggcgcccagggatggcctggcttgcaggccaccacattaggccagctcgcaggtccccagtaaagcctgaagacactggcccgaggttggaggtgggtgctgctcgactttctggaggatctcagaattctcgcttcttgctaggactgaaccatgagacttacagccatacttcacttttcccagggtttttctttttgaaacagggtcttgctctgtcacccaggctggagtgcagtcatacaatcatgactcactgcagcctcgacctcccaagcataaatgatcctcctacttcagcctccccagcagctgggaccacaggcgtgcgctaccacgccaggctaatagtttaaaaaattttttggcagagacagggtctcatcatgttgccctggctggtcttgacctactgggctccagcgatcctcctgccttggcctcccaaagtgctgggattacaggcgtgagccaccgcacccggccacacttttccaaattgtaagcaggtaggagggccctaggcctcgtcggccccattgtgcagggtggccactgtccaaagagatgggcaaagagctgctgccagaggcctgggctgcagacgccctgcatggctctcaggggagccagctccctactccacacccctgcacagcagcccctctcctcccctcacgggtctgtgcagccagcagcctcccaacatgcgccagcctcctcactggatgatgccagccttccttgcccccagatgctggcatggaggcagggttccactctgcctgcctatgcccacagagcctagaacagcagggccacctccttctctcccccgcgggcatgggcccccacccccactgccggcagagtgctgaggactcgtgcaccatgagaacttctgaccatgagaactttgacttccggatttgggggatctgcccaggtgaacacatcagctctgaaattcatcactttcttcgggcccctgcctgtcctgttccaggcccaagcctacagaaggaagaggaaagtccgcttagcaaatgggggaggctcccctactgccagaagccctggctcaaggcctgggccatgctcccttatctcctggggcgttcgtgggaattgagggtttttgtttgtttgttcatttgtttttgagacagggtctaactgtctcccaggctggagtgcagtggcttgatcacagctcactgtagcctccacctcctgggctcaagtgatcctcccatcttggcctccaaaagtgctggtattataggcatgagccacctcgcccagctgagggttcctaagcagtggttcttcaaatagtacctgggatggaaaattcctgctggggcttcctatttcctgaaagcacagagtggggcaggcaccctcgggctaaaggaggtgctactgtcaggaggcgagggaaggagtgggccagggtcttgctaagggaggcatgtggggccggctgggcttctagaggtcgccagagccagtggcctgcccggctgccccacgccctcagcgcagtcgggacagacactctgctctttggggctgacacggatgcgcctgagcaccccagaggccagcctgggcggcagcacctgggagggagctggacgacagcagctgcaggctgtccagggccccatcctcgtacagggccagcttctggaccatcttctgtcgggcagggttgatgataatctgcggtggctctgacgacgatgatgcagagctgccaagggccagtcctggggtggagatggcactcccttagcctcatgctgtggctccccagcccgcagcctagcaccctgcctccctggcctcaggcctgaattcctcagagaagtccaagggcagggcccagctctcaggctaccagacagagccctccttgttcccagccttcaggaatggggtggggggagggctggagagcaagctccacctgggaaggatgtggcctggggaggggaaaccagggttgctaaggtcacagtgagctgaacatttggccctggttctcttctagaaggctggggtggggacttacaggggctttggcccaaagaggccttggtccctctcctgggaacccgtctccccagctaccttccacggctgtgggccgggatcctgggccactcccccagctcgattctcctgccgtgtccccctgaggacagccggcctccctgaggggtgctgggtccagagggcagcttggagtcaagtgccaggagcgcagggcagcagagaggccgcctaggctctcgtcactctccacgggctggttggggcctctctgcagctgctctgctgcctgggcactggctcctgatggcgctgccaggggctgccatggagcagccccactgtgggctctgccagtgctggacacgtaggagttctcctgcggggaaggggggatgcagctggcggcctccgaatgcccgggcacccccgccaccactgcctgcagcttctctagcctctcgtacacctgcaagtggaaaagagggactctcagggtgagatggcagccctggccggtcaccccgtgggcaaaccacagggctgctccaggccgtccgtgacctgccccagggctctaaaatgacataccctgcagctgggaacgctctgcccctcgcccctctgttcccatcacagggagtgctgagaagcgcggctgccaaaagcaaggactgagaatggcctcgttcttttctacaaaatgaatctcactgccccgctgccctcaaacggggcctctccattttcaactgtcaccagaggagaagaggtggggtactagggaggggacagaaaaaggcagatgcagtagtgcagtgcgcccagcagggggcgcggcagcagctctttccttctctctatgtgaagggggtcggagctgggctccgcaaagcaggactgcccggggcccctcagttcagaggggcgctgccccaaacagaaccaaagggcaagcaagaaatgtgtggagactccagagagacctagcaggtgctgagatggggtcactacagagcaaggcctggaatgcgggctttctatctggccaccccgtcccagtgcgcagctggctacctgggtcataggaggcctccttttggcccggcggtgcaggcagcagcaggccagctggcccaggcccaggcccagctcaggtgggcagggcccgggcctggggtccaggtgcttcttgtagatctgcatggcgatgggagcagcccaggcatctgcagccagacctgcttgcagtgtgctctgggtgcttctcaaagccactccagcctcctcagcctcctcttccaccaggtctttctgtgggataaatactgtcagtatggctaccaggtggccacacctgcagctgcagtcctcaggtccttgtcactcaatcgtatgggttttgataaaaaaaaaaaaaaaaaaaaaagagatggggtctcgctttgttggcctggctggtctccaagtaggctcaagtgatcctcccgcctcagcctcccaaagtgctggtgttacaggtgtgagacactgtgccacagctcttggtctttctacaacttactttttttctgagacagggactcattctgtcacccaggctggagtgcagtggtgcaatcatggctcagtgcagcctcaacctcccaggctcgtgatcctcccacctcggcctcccgagcagctgggattacaggtgtgtaccaccatgcctatcttgctatgttgcccaggctggtctccaactcccaggctcaagcgatcctcctgcctcagattcccgagtagcttctagagatttattaaacacctactgtgggccagtggtgctctgggccctagggatacaggaacaaacagaaccctgggacccggtttgacagagctgacttcctggtgggggagagccccatggagctggggtctgaaggcaggaagtagcctgagagggcagagccgagaaggaaagcgccccacagagaggtgccccacagacaaagaggtaccccagagagagaggcgccccgcagagaggcgcccccagggtggaaacaggaccggaggccatctccagttctgaaatcagacagaccaggaggaaccacctgggtgggcggtggcttttctcgcagagcgaacggcacatactaaggctgtgaagcaggcagcagggagcgccccgagtcccagggacctggggcgttggggggtcaaccacataagggactgggccttcaccccaagagcagagaaaaggcaaaggggcctttgaaaagagcactttggctgcagggtggggagcaagtggggaagtccaaggacccccaaggagcctggtgcgcttcttcagcaggatgcatggatggacggacggggaagggaaaggaaggagggctcaagcccggctcctgggttctcagcggggctgaatcctgacggagaccccacagcacacaggaaccgccccaaacaagaggagaagcagtgaagcaattactggctgagcacattctgtgaagtctgttttgcatatgggaaaacaggcccacaggggagcaggaatttgctggaaggccactgtcaggctggggctaaaacccaggtctctagtctcctggccccaccacagtccacggtgaggcagactgagtggagtaagaccgtgaggcagctcaggctgccctgcacggtgcggagagctcagctgcagcctgctggggcccaggaggttcctcggggcctgcttcttctctaccaccgcctttctccggccagagtcctctgagttccactgcagcttgggtctcagtgccctgggaccgcccttccccctgcccccagcccaggtggggtctgtacaaggcccatagtgtctgcaggacagacaggtttgtcctcggcaaggtaaacgaagttgtttggagccctgcctactttcaaaaatgaggccactgtggcagcagaggcatccatgggcactgcgccccagttatccccgccactggggctgtgcctgctggctgccagcagctgtgtgtccctcctggccctgcctcaaggggctcaccagatacttggtcctggcaccgtgcgtcttcacagccctctgaccagccaaggtctctagcactacctggagagagggaagagggagagcatggcagtggccttggcagggaagaggcctctggtgtggacatggattgggcctgacaagggtgtggacaaaggcagagccagatgttatgggactgaagctcgggcaactcggagagcccacttgaagacaaattacaaacacacagttaggtgcagggtgaggaggagggcctcggagggagggggaccctggagctgcagcctcctggggtcttggcagatggcccctggcccgcagtgcactctgcagcccccacctctgcctgcctgtggcttctcctcctctgagccagcagaggggtcagtggctcaccaccccaaagctgaaggtgtccgtgtccacagccagccttcccgtcttgatgtactcctcgggcaggtaggccagggtgccccgcactgtctgtgtccgggccaccatgctgctctggctggggctggacccggcaaagcggctgaaccgggccaggccaaagtctcccagcttgggtgtcagcctctcatccagaaggacgttggaacttggggagagaagacagtggcgtcagcccggtcctagctcctacacctgcccggcttagataaggctggactcgaggctgccagcccggtgccttgcccacagaaagcgctggcactgccctgagcgctccagctgcctgggggcctctgctcatcagtagggcccatccttggcccgttcccacacctgtgcgatgccggggtgttgaggtcccaggccatgcctgatccccacattgataggacgcggggccccccttgctgcaggccctgccccggcagttctcaagggcccctcctcacctcttgatgtctccatggatgaggctggggctgtcctgatgtagaaactgaattgcccgggctgtacccagaaggatgtccagtcgctgaggccaggagagaggtgggcaggcctgggtctggggtggcaaagggggacaggggaggttgctggatggccgttccttgatcccaaccatccttctacctgtcaccgtgcagcctggaacagccacttcactctctaggcctcagtttcccccttctggaaaacgaggagcaaagtctccgtgacctgcacttcttaagcaatggctggggacacgttcaatagaatctgctgggcttcggctcccagggctcatccctttgtccctggtggtcgggaagtccttgaaggcattcttcccgctctccccaaacgcagcatgcaggaggaggcaagggggccctccctcagctgtaggtggtccagctggtagccccagaccccctcgcctccggggcttgctgatgagaccctccagctacgctgcttgcaaaggggagaggcctgggaaagagctctatagaaaacattgggtcgggccaggcgtggtggctcacgcctgtaatcccagcactttgggaggctgaggcgcgcagaccacctggggtcaggagttcgagactagcctggccaatgtggcaaaacctcatctctactaaaaatacaaaaattaggcaggtgtggtggtgcatgcctgtagtcccagctactcgggaggctgcggcaggaggatcgcctgaacccgggaggtggaggttgtggtgagctgagatcacaccactgcactccagcctggatgacagagcaagactccacctcaaaaaaaaaaaaaaaaaaaaaaaaaaaaaaattgaccccaccgtgggccaaatcctgagccgggtgctgctggggagctggaagtgcaggcctggcctgctggcaggacccactcacacaggctgaaagccctaggccccgcgcccggctccagccaggtgtcaggagtgctttgggtcctgggaagcgtgccgggccaggtgagcctacctggcagtggagacggtcctccagggagccgttgggcaggaagccgtacaccaggcagtagaagccgttctgagcacagtagccagcaaagtccacaatgtttgggtgacgaaacctgtttgaaaaaggggagcactttccatcaggccagactgggtgggcagccctggctggggcctcagctcgcccgggcctgccaggcctcaggtgcccaagggagccaggtcctgtggtgtgcggtctgaagccccacgggacctggtgtggctccccctctggcctcacctggacagctgctccacctcggtcaggaagctctgcttcactgcagtccactccaggtcagcgttctgcagcccccagggtgcggtgggggaaggggcagggaagacgggcagcgtgaggctctcgaagcgaaggccttcgggccaccagtgccacctacccgaggcccagaaccaccaaggggccagggaccctacgccagaatgagggctgaaggagttgtgtggggaagcgagggggaaaggctggagaagtggtgagggttatctgatggccttccagggtccctgccagggtgcgacactcacctccttcagcctcttcacagcatacaccgtgttcctcatcaccgcccggtacacgcacccaaagccaccctccccgatcttgagctcctccgagaagttgtgggtgccccgggaaatctcacagaggggccagcaaaacggaaaggggcgggctccctgcaggagggacactgagctctctgggcctggctgtgggaagagagcctggatcaggtggggtccctgtctcttcccttctgcccaaggctccaggctctccccaccacagctgcctcccagctgacccagcttggctgactggggctctgcgctacatcaaaggctgaattccttcctccttgtctcgaatcttccctggggggcaggggacacctaccttggtagaagaaggggctggagatggcggtggaggccacagggaagcagggcttgggaccaggccgagctcaggccctgaatgggtctgggagcctggaaaagcttcataaagacaccagtgagaggcaggcagagaccagcagcagggtctacagccgtggccgtggtcaaggtgggctcttctttgggtccaccgagcctaacaaccgggccctcttacctggggagaggaaggtggaggctgaggatggcaacttccgggggctccaggcctcggcctcggcgggtgcagggatgctgctgggcctcggggcagtggtgcctggggacggaagcggggcgggagggtgccctgggacgccaaggaaggaaaggaaggttgaggcccgggtgggggagccccgtggggcccgccggcctcccagccgtggggtgcccggagtcccgcgctcacaggctgtgatgatgtcccgcgcacggagcagctgcaggtgcgtgaggatgtgcacgaggtcggccacacgggcgttgcggttgatccagggccacaggacgctggccgtgcgctgcccggagcgctcgcacagccgcagctcggtctggtcgcgcacgatcagggcggctgcggggcggggggcgtcaggcgtcggcgccaggagcccgcgcgcctcccgccccccggcagcccgccgccacccaccgaactggcaccagtcggcgggctccagggcgtccatcactttgtagaagcggcacatgacccagggcggcacctcgtacaagaagtgctgggcgccgggggctgcgggctcccccgggcccggccccccggccatggctgccgccgccgggccgggacctgccggggcctctcagggccgcggcgggcgcgggcctgggccggccgggtccgcggacactgactcacttccccttcgagccggcctcgtgcgacgcccggcggggcggaaggggcggtgcccgggcccgccgccatcttgcgcgccgcggccgcgcgctgggtcacacgggggcgccccgcgccggggagggcccgggtcccggcgggttccgcgagcggcgatcggcctcccgggctcgcccgggcggggctctggaggacgaacggcggctcccggcgttggggacagagggcagggcggaggcccgggctgctcggaaaggggccggggccgggccttccgaaagctcctgggcggccctgccggaaccctgctctccactgcggcctgcagggctgttaccaggagccctgcctgcccgccccacgtctagccccctgcacacggcagcagccttgagccattcagtctccttaggtgtcctgaaatatgccgagaacgctgcccgccacagccgtgagtgtatgcgttgctgctgccccagccctcatttggcaagggtgagctcaggcagctgtggtgaaggcttcctgagcccgccggcagagctcctgccaccccgtacctgtcccctcctgggcatcgtccttgattacttgtctggaccgccacccccggtccccgccctgagatggggaagaccccacaagcagcaacgcagacttactcttttgtttctccagctggatgtctcctccagcgacagttccccttgccctcttgatcctgacagcgaaggggttccccacccctagccctacagacttaggacttttcctagaaacgagaagtgcccaaggcccacagctggcccctgttggagtctctttcctgaagccaccaccactgtggccactcccaaggaagatgccaaccataccatgaaacccatggcttctcacgggacagactttactgagatgtaccaactcaagtatctgaaatgactgcacacccatgctaacctccacgggggcacttggtcctacttacacacaaaggcccatcagctcacggaacagggctggcatacgagatgctcaatgcatacaagttgacttttcaaccctgggatctacctttgaaggccaggccttccgagggtaccttctagcatgtgcatgtgaagctggactcctttgagcagttgtctcctccagccccttaccaacctggtgaggctgctcctgagagccaaggaagccagtaacaagggggccccctttgggcaaacccctcagcctgcccttgcctggtcagagaaccacgttagcagtcaacagagggcacgtgagggtcctggccagaatgagacacaggaggagccacagcctgcgggggtgggggtgtccaaaagcaccacagcacatccagacctagggggtgcccctaccatacgggtctggagcagggaggttgtgctgcaggctgactcatgccaggcccttcccgtcacacgctggagcagtgtgcctggagagcactggcttggaagaagctgaggggccagcgaggccagcatatggaggaggcttcccttggccgctcgtggcaggcctgaaggcagctacctgtgtccagggacagccagatccaatgaggaaacgcagcaccatgctgtcatgtgagctggagggggacttctgtcttataatgaaagcccagaccttgagtcactttcacagagagatttatcgagaatgctaacagcacaggatacagtacttcccaacaaaaggtgcaaacgcgtcacttagaaaggcatgctgagtattctttgctttcacatgtattaaaaaacttacaaaaataaaataaaactgcgtgctgcccatcttttccaatagtaaaagaaccttatgaaaaaatcacttgatttttacaacaaaagacacaaacggacatttttatgtaaatttataaggcaaactctttatataataaataggttacagggattcagtggggggggggtgtttttgaaacgtatacaggtacattcagacaggtttactgaaatggtacaaatttccttaataaattgccttttgtttttaaatatatcagtgctttcagtcatttggctatacacaaagaaccttttttctgaacactacaaaaaagcaatcaataatttttgtttttaaaacgacctacttattttctaaagtaattgtcccaaaacacaaaaactgaaggtgaatacgatacagggcttttagagacatctccagctaagtgtgtcccggcctctccctgtgccccaagtgcacctctcccaacctcagacaggtttccaggctggagccagctcccttctgcacagggtggcctgtgttactggcaatgctgtccatagctctcggcctctgggctggcacaggggagcatgacttcaactcaggagggggcagacaccctgcctagctcttccagatgctgcacccggcatgcaatggtcactacagtcagcactctccgcctctcagaggagggaggggctgtcaggtgttttgggagcccaaaaccatgcctaatgagggtaatggcttttctaaggagatgttttcgccatggaatgggaaggggttttctcacatctaagttttgctggcgatcgggtgacagccaagagagtgcaagccccctccatggtcattttattgccctgggaaggggagggtggggaatagagatgtcacagtgttgagccctggaggatggggtgggatgtgacggaagtgtcttaaacagtaatgcccacggggcacaccttggagagagaatgcccaccacctggcctgtccaggaagagctgcatctgccaacattagcctgacctgtgcccacagcagagcgtcccagcctcctgcttgggtgggcccagccccattctccccagctcttcagctctgcacacacacatcccctcctggctcccctcaaggaaacatcaatcttgcctttccttaaaagcacgggatggtggtaataatctcggggggaggggaagcaaaacaagaatccactgggcggaacaaaacctggttttgcagtgacttggaaagtggcaacacatcagctattcggcttgctggcttggagtgggactcctgggctccactgctttgggtggcttctggctgatctgggcaggggtcatctgttcagctctcccctctcatctcagtcaccatccccctccctccgaatgcttttgtttgtaaagaaaaagtgtctagaaatatttgtctctggaacaattactttaaacatagttacaatacagacttcagttcaaacacagaagagatttacttagcaaaattcctttcacccaccaaaaattacacaaatataagcctcaacaccacagttaagaggaccagtagagagaacctcatgtttggaacacaaaaggagaaataaaaaccaaaccaaacccaaacagaaaaaccccagaaagacaagtaaagggcaaagaaggaaggggaaggggagcaaacacagcacacgttacagtgtccagatacacgggagcccagcatgggcaagggctcggcacacattgagtaacagtcctggtgatatttggtcatatattcattgactactgactctggagcggctgttattgattgaagcagtgacaaatcaaacggaaaggaggccgtggtagcaagggaaggagcaggcttcaagttctgcaagccttttgcactccactgtccagctccccagaaacactgaaccgggtgggccccgctccatccgggcagggctagaggtcaccgggtgaggctaactcgggcgtcgatttcatgtcagtcagaaaacacgcacgtggacgcacgcagacacccacctgttcacggccaaacatcagcggcaacggcctcctcgcctcctctgcccctatcccaggctgggtgggaaagagcatcatgacccactgctaacactgaacacacgccggagctggccccggatgtgggcccagaggctgccccagccctggtcctccgaagggctcacgggtagcccggccactgaaagggcctatggctgtttttcttttggattcaggcctcagaagaagcaatgacagcagggagggaagcttttggccctggtgattataatgctctctgctttggaagaacaagtttctggatttttttggtgtttctaattattaaaaaaagatgatcaaaaagaactgttacagctaaactctctagcagatattgctcattaagaattacaaaagcaaatgcaattactcgtaggatgggggagaagaaagggacatttctggagtcttcactactcctggaggggaccccttggactgacgcacatgattctggggtccctggcgttctacctggtgcagctcacaggttccgagacaggccaggcctcccgtctccgctccagcccccaggctcgacagagtgggaaggatgaaacacactcggaccctactggcagggaggcctgcgaggctgactccacatgggctcaccctgaccaggtcacgggaaggggactgggggagtcaggccaccccagtggactccagctcccagaggtggaaggcgaccaggctgtgccgactacgttccggacttcagcaggtcaagggagcgctcctgcacccagaaccttgggacctctttcacaagcacgggagaaacaagagtgcaaaacctgggtgctgcctggagcctccttcacctggcacaggaaagcccttgaaagaagcgaggaaaagaccacgaatctgcttggacagaagaagtgaccagcagacagatttgtcgtttttttttcttttttttctttttttattttcccttgtcctatgctatggttatcagaaatattgtaattaagcaacaggtataattttaacaggtctttttttgtgtgtgtggagccacaagcaaaatgagtttataattgtgcaatatacagatatatatataaaaattcaactgctttgtgtgtctagtcggtgcgttaaataaaagggacagaaaaactaaaagcaaaactaaaaagcaaaacaaaagcccaggatagaggagacaaagcaggcctatgcgcacagtctatgtgttactggatataatcagggtcaccaggaagaacagctttgccacttgacacacaaacactgcggggagaggggctatcagtgggcaggagccaaacctcttggccttttcacctcatctgctctcactgctgagcaggacctgattaaaggtaggacagaatgggggtttgggggcaaagagatttccaaattccccaaatgttcttgaattcaaaggtaggatttcctccagggtctgggctctgcctgtgcacaagtcggagcccggagcgggagctgggggttgtgctccctccttgcactgccctcacacctgcttccttctgcctcctgacagggcaggcagggggccttggggaggcagtgagaggccagctcagaaggctcagctgatccgaggcgagcagagcaggagtgggcaaggcaggctgcccctcaggcagaagtgccttcctagttccctgggtgttttcctgacacgtcagcgctggggcaggctctgtcaagatgagaagagtgggaaggagggtggtgctgggccttccaggtcactggtgaacgctccaccttccataccactcccaaaagacaggttcagaagccatgtcctcaggtcggctacctccagattccccttgcctgtaatgctcaccaggcatctcaggccaagtgctaagtatttttagatcagcactgttgtaaaagcttgctcgtattcattcaaaaacatcgaaatgtaattttctgccaaatgttttctaggttttccttctaaattgttgagaactgacttcagtgttcagcttttcccctctaatatgtaattttagaccctgggggaggcagtatcctaacgatttataacaagtagactatgccttttctaaagattgatacaatatctaaaagagaaagacaccaaaatggagagaatcaacaaatcccgtcagagcagagagaagagtaggaagacccggagggagcagggctctgcccccccaccgggcaggtcctccagacccactccatggtaggaactctagaaacagctgactccctgaagtctaggacacaggtcctagaatctgcaggtgtgaacttgaaacaggaatccatttggggcaatgacacaggctaaaaatgtatatgcccaaagatcttcttaaagaactggtacctgtaacctcccctggcccagtcagcccagagagcctgactggaatgctctggaaaaggagctgtggttagacgggggacacagagttctggctgtcaggctccacttgggctaaaccaattccagatggtcccgcgcaggggactccgctcgtatccctctgctccctcctgggcttgagccgcttactaagtgatttaaaattcagagattctgtcagctaaagaaactcctttctccacccaacttggcagtttgtgtctggttattaccctctttcgccatcactgtcacagcaatgaaaagctgggcagagaagcaggtgacaatttggggctgctccctgtcccaggtgcactgttcatgcttcgggcctggaatgatgccacccaacagaagattgtctgcacccgcactggcgctcacgagtagcagcttccgccatccagcgagctgagaagctggggccgttggctagtttggcactgatggattgggggatgtggcgtttctgggtgtcccctgtgtcttttgatatgggaatacagcatcaacagaagggagctgtgctagcgcctggctgtgaccaagtatctccagctcactgagctgtcaagaccggcaatcccactggctatgacaagcccaccagcaggcagggccgggaggggtagacctggggggagctcgacgacatacagtattgtcaggagaggaggtagtaactaacaactggaacaagggtgggggagactgtggatgtggccttaatgacctagccccatgggtactggaaagctgtcggtcaattctgctgttcacaaattcactgaaagaggcccccatcttcataatgttcaagtacagacaaaattgaaattgaggtcacaccccaaaactgggccggacacagctggtgagaatcctgcagcttaaggctttccctccaacctcctgtcaacctgaccccaaggcaggggcagcatgagagctgcagggcccctgcctgccagggcgataaaccgccaaggctgcctgctgaaaggcgactgactcgtgatgcctttgggaaagacgagggaatgaggaagaaagggggaaatagagagaaaaccctaaggagcctcaggccccactggcagctctggaataaactggaagggaaagaggctgggcaactgcctctttgagggagctgcaggtggggcccgaatgaaataaagtgacgcttgaaatgctgtgttcccaaccacgactgccccatcggccctgaatgaactgtcatgggtgacaggggggcctggtgggccacgcactcctcttaccaggaccagatgacgcccaggtgacggggaagcagctctggacaatgattccagaagccacattacatttgactaagtataatacataaaaacccaactgaccaaaataaacatcttctcagtgacaacctggtcggatgctgcgctctcgtggataagtgtcctttggtagtgccaggagttcgaggccactatgggggcaggagccttctgtccttggaggaagagttctggaggactcaccctctcttctgaccccccttcccttcctggggaagagtcagaagtgaagctgggggggtcatcagcagagcaggtggaagggatcagggatcagggattgggctgatgggagtttggttgcaggacttgcttttacagcataaggaaatggacacatatatgctagaaagtccaactatgagactctacaaacagaacggggcaaactccctcacttctaaccattccagaagagacaaacacggttttttcttaagctactgattggaactgtcaactatggttcctgatcactaaagactggcaaggaagtgctagacagtttctatgatgtttcactccttcatgattacaccatagtaaggaagccagggacaataactgaaatacacaagacaacacacacttgacagttcatggcagcagctcacatgggacatgcctgtgggtgtttctggaagcataagactgctgtctcatttgctactttgataaggtacttctcagttggacagatttagatataagagacatctctgtaaacacagaaaaggatataccaatatgatgaagatatgcagctagataaggacttcctgaacagaggttaaaaagatgggatcccacatgaaaactgatcaattaaaaacccacagcaagcccatgcctctaagcccctacaccacagctatggaccagacagacagtgaaatgtgtggtgttctggccccctgtctgcatcgagcaaaagcaaaacattgccattcaagaagaactccgagggaaaagggggagcagaggaagggctggggacccaggtactggtcccagctcgggtcttgggagttctgcattggtaccgctactgccctgctgcactacgctagactctggacttctgagtgaggtcaaggtcggctggcatggagcccctgttgggccactcgatgactggcaggccacaggaggcctctgtgctttcctcaactaccaaatcgggcccagctcctccagtccacttctctagagtagaagggtgaaaaggctcgttgttcagggtgggaaatgccttttgctttttcttaccagggaagagggggctacctaggagagcaagaccttgctgctctcttgctcttcacagacaggccaggtcggactcagcagagcccaaggcctcctcagggctcaaaacagggtggggctggtactggcagcaggaggacaaagggcaggcagagttctggggactggagccgacaagtgtggttgggcaccgcggctgcctggaagagaagggatgaactaggaaggaggaggatggaggaagggaaagaagtgaaaggatgaaatgaacaaaaggcagaaatggaaggggagaagagaaaccaatcaggaagtccttataaaattgcagcaaacacttagagtttcggagcttcgtgggaaccctatgtgctgagcccactttaaaacaagcgcaggtatatatacaaatccaggtagttctcaacactgtcacatctggtggcttgagggactaaatgtcaccaattcaagccagtttgctctcagagcatctgtttgttttgaagtgggaacatgaagactcaatagtgcaaataattctaagctgtccctaaaggagaattggaaagtaactggaagaacattttcttctcctccccctttgccccctcccctgtccactaagtcacagactgctctgagtgattaggaatccctctcaccccgctgtgctctgcccggcctgaccccaggccagcctgcctgcaccttgtcctactgcctccatggcctctagcgccacccgttggaggacgtcccttgagaatggaccatgccacctcaccctgggccatcctctcctgtggttcaggccagtctacacccagtagttcaagggactcccccctcctagccatgccagagctggagcagacaggtgccactttcctgtcctgtgaagcgtccttgccagttttggattggggctggtgtggggccagacttgagccaccacgggtgggatcgcacaggccatagccactggtcatatccatcttctctaaagaatccaactgtctctcctgcctcacacctccctgtcccaacgtggttgggagtgggggaggtggggggagctgggggagctgtagacggggcactgatggcaccgaaaacgggagtgtcctctcaactgctctgtcgctctgtctctaacgaccacatgggggaaaggtttgggcgggaggggaggtgcctggtcaacagcttgtctggtcagtagtatctgcagcaagccttgttgaaggagcctagtttagaaaagtgcaaagctacttctggccctggttaggtcttcaacctgactgtgcttgtcggtaagaaaaacatccccaatgctccaactactcccaccctgaagccacgaaactctaagtttactgaaagaaaaaaaaatattttttatttcagttaatcgggaagctttgtcagagccctacccataaggagaagagacaacagctgcctttattcttgttggtttgctttgcaatccgctccgtgtaaagtcagctaactctctcggtcacgggcgtccggctgtccacaggctcctctctgtttggccttggcatggaggatgaaacaatgtctttgcgctctccctcccctcggtgtttgtacttttctgcggccgtggcggcggtggcaaccgcgggctgagtcttagctggctccttggggcagccgtcgctctccagtgagcctcctctgggcatcttctcctctttgcagacgctgctgctcaagtcctggggctcaggggggctggtggggtcctcggagctctcgggctcaggtggaggtgggggcaggggtgggagcagtggcacgggggcctttggggactctgagtggtggtgatggtggtggtgctccttcttggggggtgaggaggcgctgctgctgcgccccttggggctgctctccttgcttttccgcccagggctcttacaggtcttcagtcctttcccgctcttctcaccgagggtggacaccagcaggggcttcaccacttccttgacctcgatgctgaccgtctcccgggtcttgcgcttcttgatggggagtacggtctcctgcacagatcggatagaagactccttcacggctttctttttggcctcggcggcagcggctgccaccacactccccggctttcggccccgtttcttgggaatggcctgagggtcggcctcagcttttcgcttcctgccggggcgtttgatcaccatgacctgggtggatgtggtggccccacccccctcagccttgccccctggcgaagtttgaaaaggcatcttgacaaggagcttcccaggacttttctccaggacccttttcacctgcacaccctctgacgtggccgccttgggtctcgtggtgccgctccctttggggcgtccccggcctctgccagttcctggagctttgggagatttgggcttcttaggtggtttctgctctcgccgggaggggctccctctcccagttaccgtgaagtcaaaatcattagggtccagggatgtgtcgcctaccttttcgaagtacgcaatcaactccactttagagcgaaaggcttttccctggggactgtggggacaaacagaaagacacaaggaacaattagaggctctccatagcaatgtcagagatagggcagagcggatggtggtgacaacgctctgacaaacgttactattgaacgagagtcacactgcctggctgcccctgaggacctgtcaccaaagccactcactcgtctgcctgccgctgacccccccaggcctctccaaagttcagcaaccaaagagtcaggcctggtacagaagggttgtcaggctgaggcccattctgctggttggtgcctgggcctgagtcaccatctagaacattcccaagtttgaactcaggtacggtgctcagtctctccaggaatcagtttcaacaagataatcctttgctcacccttctcatggaattaaatgaggctgtctgcaaatgtcatttgaaaactgctaacctttttgggatcatttaaaaggcagaactgaaacatgcttcttcacccctctgaacccctagctctgcaagttcctctgcttccgcagctattccatccccagataaagacttgaggtgtggagaggatagagggcctgctaccttgagaacttcccactcagggcagcgacctctgtacacggtcatttcaagcacacctggtctcagtgttcattgtttatgttccccccgaccccaccctgggcacatacattttcctgctccatgagggatccttgtccctgccctccctgccctgtagagataggagttgctcttacttacttgatcaaatacacatcatacttcccagcagagcggccagatttcctttgcttaagcttccgtgtccagccttcaggcagggtggggtcatcatacatgggtccccggtcacggatgatggagcgccgctgtttgggggaggcagaagcttccggcacagccggggcggagcctgacccttctgatgtctctgctttgcctgcctctgcgggctcagcagagtggtgggctgatggctgcacgggctcatgcttgccctctttctcttctttcttatctttcttcacctttttaaacttgaggggtttgtccttgaggccctggaggtcctggtcttctgacttttcttccctgaagtgttaaacaagtatgtaagtatcacagagaacatgccagtctgcagaacaagtgagcagaggcaggcttggacccccaccacatgcaaggccccaggccatcatacactcagatcttgatgtccttccccaggacaacagagactcgggccaagctgggacccaaatatttctttaggaatttgggctgtgggtggtgctggccggtgtgcctgacctgcactgtggccacccacaagtctcctagcactgcaggagaatcagagccctttcctctgagcggaaacactgcggctcctgagcataccaccccagcatgagtcgcacttcaagggactctgggctcgatggctgacaagaggccgtcgactgctggaaagggagccaaatgggggaggggtctcctttgtgaaggccgggccttgggtgtgtttttggttttctagaatgaggctcaatgaggcacacagtacagtgtcatggaaagcacacacaggtttggagccagccaacctgcactgaaatcctttgccgctttccaaacatgaacccagcaaatgacctcagcattctgtgcttcagtttccttatcttgacaacaggtaaccccatctaggcatccttactgtgagcatcacaggagaaaaggcacaatggcactatataaatatcagctaactcaggccacaggaaactaccgcctagggtcctgggggtgataagacaagtggtcccaggtggcgtgagcctctaacacatgttccctgatgaggaatggcctcggccacagcagatgcggagggaagagcaaggaaaaaggtgtggtccaggcagagccatacatccccttcctgccggtggagaagagcaccctacctattctagtgtgggaggcttccccgttcttttctggtgaccgaagcagctccttctctacacatcactttggcccggtggggtctcgtcagaaatggccaccgtgaggccccacaccccagcatcactatctggccatgatgctctagtactctgtcgagtatgccaccgtgaaacctcctaggactccagagcctctgcaacaacaggggcagcttggaaagaagcagcagccacctgcgagtcccttcgttagcagttcattctggaaaagagcatgactactcccaccctccgtgttctcagccccacaactcccctgtcccatgtggttcacatcagtgctagtcaccgccttgcggctggtctaccccaagagacttcccctcttgtctacactgcacagactgtgcaatgagggcaccatggcactcactggcaagcatccttaggaaaccagaactcaaatgatgtagggaagttaccaaaggctgcttagtgctgggactcagaagctgcaaggacgtatctctccagaaccatcaggtcaggtgtagggaggcaagagatgttccaatctagtgacaaggtcttagagtgagggaatgtcttgtccccaccatgactcacccctgagttcctccctatcctgtatcttcctccagaagtttagggcccagagtgtggctgccagagtcacctagagccactgcatacacaaaggcatcctacaacccacagagcagtctttcttgctgtaaagaggggtccctaatctgtcccagcacagagctcgccttgttttgttttttgttttttttttgagatggagtctcgctctgttgccgatggcataatatcggctcatcgcaacctccgcctgccgggttcaagttattctcctgcctcagcctccggagtagctgggatcacaggcgtgtgctaccacgccaggctaatttttgtatgtttagtggagacggggtttcaccatgttgggcaggctggtctcgaactcctgacctcaggtgatcgacccgcctcagcctcccaaagtgctgggattacaggcgtgagccaccgtgcccagccagagcttccttttcatgtctctgagtcttacagctctcaatgggaaatgacgaagaaccctggaaagctaggtgtggcctgttgcccaccagagatcagcctttgagaatggacccctaggcagctccccagctccccataaaggagggagggaaggggagccaccagcagagtgggccaagaaagcagacagatgggaatcgctacttctacacaatccatcatggcactgcctaacgccagggctgctccctagaacccggacggtcctaatgtcagagaaaaacagtgaactaatgggaaagatctggcttcttcgaaactctcatttgcatttcccaaataccttaatcaccatgaggtcaaactataaacctaaacgtgacgtaaggaatgccttctagaaatctatgctaaagagacacctccagaaatctcaaagaacatatgcatgatgttatttgctacaacattatttttaccagccaaaggcttccaatacccccgatccctatcaccagggcacttgctgaataaacttatggtgcgcccacacactggagtactgtgcagatccaaagggactaaacaagagctctaagaactgcgatggagtcatttccaggatccactgtgaagcaaagggagcaaagcgcaaacatatctactgcattctaccaaagaaagaagggggggtattaaggaaggacacaccaggaactaatgaaattgattccctgcatggggtagggggaaaaaggtaagggtacaggcacaggagtgaggcctagctgaacatgcctcagtgtaattctgacttctgaatcatgtaaatgtttatattacccaaaataaaattcaaactaaaagtaacaaaaccttattacacttaatgcaaataaaaacaaatgagttcgggccaggcatggtggcttcagcctacgatcccagcactttgggaggccgaggcgggtcgatcacctgaggtcaggagtatgaggctgcagtgagccatgactacatcactgcactccagcctgagtgacagagcaagaccctgtctctctctctctctttttttttttttgagacagagtcttgctagagtgccatggcgtgatcttggctcactgcaacctccgactcctgagttcaagccttctcctgcctcagcttcccgagtagctgggattacaggtacctgccatcacgcccggctaatttttgtatttttagcagagacggggtttcaccatgctggccaggttggtcttgaattcctgacctcaggcgatccacccaccttggcttcccaaagtgccgggattacaggcatgagacaccacgcctggccaagaccctgtctcttaaaaaaaaaaaaaaagaaaagaaaaaagaaaagaaacaaatttaattctatatcaaattgacaatataccacagagaaaagatttatttcaaatgacttttgactacagtgctctgcaaacctgtagtgggacatattctaaggccaacaataacactccaggggcagtaaacacactagattggctcccaggagagatatgtgattctgcttctggggcatcttgtgccagaaagcccggggagtgcaagagaaaaacagggagggcccatgagaggcctctagcagtggtccaggtgtggcccagggtgggggcagttgaggatttggggctggtctaggtggtgaagcaacagagctcgcaggtggattagtgtgggggtgaggggcaagggtgagtcagggaccatgtccaaagcctgggaagatggtggtgccactgattgagaaggaaaagactgaggggccggctgggtgcagtggctctcacctgtaatcccagcactgtgggaggctgaggcaggtggatcacctgaggtctggagttcgagcccaacctggccaacatggtgaaactccgtctctactaaaaatacaaaaatgagccgggcgtggtggcaggtgcctgtaagtcccagctacatggaaggctgagggagaagaatcgcctgaacccaggaggcagaggtcgcagtgagctgagatcgcaagactccgtctcaaaaaaacaaaaacaaaaacaaaaccactggagcggcaggggagcaacacccacagagacagttataccatcaaggagagaaaacagttcttcagctactcgctagaaaggggggaaaccccgctgtgatcagattctgagttgggcctgaatgaaaatgaactgtctgcttggggttttaaaggctttttattgtggtaaaatatacaaaacaggtcaggtgtggtggcttacacttgtaatcccagcactttgggaggtgaggcaggtggatcgcttgagctcaggagtttgagaccagcctgggcaacatagcaaaaccctgtctctacaaaaaaaaaaaaaaaaaaaaaaaattagctgggcatggtggtgtgtgcctgtaatcctagctactcgggaggctgaggcaggaggatcacttgagcctaggaagttgaggctgcagtgagccgttgatcatgccactgcactcctgcctgggcgaacaaaccagacacatatatgtctcaaaaaaaaatacatatatatatatatatatatatatatatatatatatatatatacacacacacacaaaacaaagtttacctttttaactatttctaagtgtacaatgaatgaacttttttttttttttttttgagacggagtcttgctctgtcacccatgctggggtgtggtggcgcaatctcggcttactgcatacaggctctgcctccctcctgagttcaagcgattctcctgcctcagcctcccgagtagctgagattacagatgcgcaccaccacgcccagctaatttttgtatttttagtagagatggggtttcgccatgttggccaggctggtcttgaactcctgacctcaggtgatccacccacctgggcctctcaaagtgctgggattataggtgtgagccaccatgcctggccctaaatgaacttttaagagcactgaagatgggaaataaagggtctttaactctactgtaatattctagttctttctaatggaaattacttgaagcaaatatagtatgatgattttcaattctgtgcaatgaaaggcacatgggtgtttgttaatttgctggctgctacttttataattaaagacaaatttcaaaaaacccacaaagaagcctggattgtgctgggtgtggagtgcaggtaaaaatgataaaaaacgtggatggagctggagtccattgtcttcagtgacacagctcagacacagaaagtcaaataccgtacgttctcacttagaagcaggagctgaatagcatgtgcacatggacagagtgaggaatggcagacactggagagactgggaagggtgggagggggtgagggatgagacattacttaacgggtacaatgtccactattcaggtgatggttacactgaaagctcagacttcactactatacaatatatccacgcaacaaaactgcacttgtaccctttaaatttaacaaataaaaaacaatgatagaaaacaggtattccaaatgagtttacccttagcccagagggcctgcccagtcccagggtgacctgggcatttgcacaccctcactaagccttcactgcaggacccaagggagggaggctgggctagggtgccaggtgactccccaaggctgtcccccagggggtttatggtgtttgccgaaacacaaactttttcaaagaaacctgccaggtgtggtggctcatgcctataatcccagcactttgggaggccgaggcaggtggatcacctgaggtcaggagttcgagaccagcctggccaacatggcgaaaaccccatctctattaaaaatacaaaaattagctgggcatggtggtgcatgcctgtaatcccagttactcaggaggctgaggcaggagaatcacttgaacccaggaggcagaggttgcagtgaaccgaaatcgtgccactgcactccagcctgggtgacagagtgagactccatctcaaaaacaaacaaacaaacagaaaacaaaacaaaaaaaaccccatacacctctcttcatcctccctctaatcagaaccccccacacacacacaatcttgattatgaggagaactaaatagctagttcacaagttcatacattttacagttgaagtatcctcagaaaaaccacctattcaactcctgagtgttacagatggaaaaaaagaagttcgactagacagaggaacttgtctgagatcaccgtgagtcaaaaacacacgtgtctgttcaccaactgccttcgtcctgagccagatcctgcagcatccttccacctccaagaactcacagtttggaagggaggacaaataggtaactacaacatagttccagcctcccttccccctgaagaaagcttgctccaggcacagcggaagcacaggggtgtggataatgaatcaggagtgagtgggctgtcagggcttatgagttccacaggtgggacagagggctcagggcatgccaggccagatgggcagaggcggcactatcaacatggttatagctcccaccctatcacccgtgtgacgcccctccctcgaggaaaaagtgaccaatgatgcccaccctgtgtcaccagaggctctgggcctaaccctgtcaccccctcccaccttttcatttggagaactttcaggttcatctggagaactttcatctttcaggttcagttaggatggcacttctagaccgggcgcagtggctcatgcctgtaatcccaacaccttaggaggccgaggtgagcagatcacttgaggccaggagtttaagaccagcctggccaacatggcaaaactccgcctctactaaaaatacaaaatatttgccgggtgtggtggtgtgcgcctgtggtcccagctactcggggactgaggcatgagaatcgcttgaacctgggaggcggaggctgcagtgagttgagatagtgccattgcactccagaccaggcgatagaacaagattccacttcccaaaaaaaaaaaaaaaaagatggcacttctgagacaccttccctgctcctgcctccctccctgctctatgagccagggcacccgagccctcagtgtacttagaacaccccactgtgcgtgccaacccccatctccccgctcaatgcataatgccaggcacaggtgcaacccttactcaacacatgctggatgaataaccacaacacggacgcagcgctccacgtgcttcttctgatggctggagaccttcgaccgtaagcttctagcaaggagaggctagctcagtgctgaaaaaaaggtgggctctgaattggtgaataaacaaatgatgagtttgggacatatcagtagtccgttggacactggtggcttggagatggcggaagatgaggtggaggaagtcactgaggagggcctcagtgccccagggacagtagcatggaggatggttacgccagaggatggatcgacttctagccatgtggtggtcaggtatgcagacacctctcctgctgaaacaactacaactgccaaactgagtatcttacagaagctgctagagaagccacccacaagctggcaagaaaggaaggaatacacaggctgaagagcaaataaaagtacggggcccttttctgtggagaaatctggcaggcaccaccttaacacacgaccaaactgagctcaggcccctcagtgctgctgagatgaaccagcatcacgagtaggagactgaagcttaccgtgaggagacagcaggaagagtccagagagggcgtgccatgcaaccacggtctggactcaagatgatgagagaaaacaagggggtgggggaacatttctgataaaggagactgaagggatgacacaatcgaatacaacacacagtcctggactctgcattccaggctcaaaggctctaaaaaaggcatttatggggtatgtggagaaatgtaaggttctgtgttagctcattgctaaacttcctgagtgtcttaactgtactgtctgctcttaggaaaggcatgcttaaacgtttaggagtgaaacagcacgaggactatgactaactctcaagtgatcaatgggctaggggaaatacagtgccaatatggtaacatgtttaaaagaagggagatgacatcaatataatcagaagctatgccaactgacagtaatattttgaagcagtggtaggcaagctttttaacaattaaagagaatgccttcatattacacaaagacattaagaaaaaaagctgaaggctgggcacggaggctcacacctgtaatcccagcactttgggaggctgaggtgggcggatcacgaggtcagttcgaggccatcctgaccaacatggtgaaaccccctctctactaaaaataaaaaattagccaggtgtggtggcgcgcacaaagggaccggggcggtgctggcggcgatgccaacagacctcagtgtactgtggggttctttcagccagaactgttcatggtttcatcagtgagctccagttaccacaccacacaagtttggagtgatccaccccgccccagtttttcctgcacgaactcatgtttttattgtgtgatttacagaacacaagatctttttctaagaatgcacacatcacacgttgaagcagaaaggcctttacaaaatcttaaaatacctacaaaatatgaagtaaggctcttaagaaataaaatattcaatgattttgctgctagaatgcaaacattagatcaaatccttcatttgatctagcaaaggaaaattagagttgcaggaatcttgttttcaggccaaaccatgacatcctgaggggtctgatggcaggaactgcctgcattttcctcatgaatgtgacctgcagtgatcttgtgagaaaggcccggaaggccgtgcaaattacaggggtacaagcaacagctggcaggtgtggccagacaggcaactgcagttaaggaaagactactcaatccctgaggttttcagattttacaaaaaggcaaaaaagccaggtgaacaaggcagatgaaaggtatttttcacttgaattggaatccagccccctccctgtcccctggagtgagctccagagaaacttccagagccccagcaatatcccaacctttcgtaaattcactcatgctcgccactttcaggagatggcatttctcagcacctttcacttccagttatccctcggcacagcacaaagagctaaactaccactcgaggcagttaacctaagggcagggtggtggctacagctccaggtgaacagtctgggaccagaggaaataatgagcccccccttgtactggctgcttccaccctaaagtgtcatccagatggtgtttccaattctttctacttccagtattagctgcagaattacggaatcaaggaggcttctctgcatgaatcaataaaggctatagcactttgagacacaagctttggccctttaaaaatgtgagaaatcaaactggcacaggcagagtgtctcagtggtctccagggagcaagagagaatgaggttcagcttgaaggctacaagggtggagcctgaggttcagctgccctgctctgaattcgcagtccatttcttaatcctccacttttgagaagatgcgagaaaccagttatgttttgctaagcttaaataaaatgcagttcttgccaaccaaaagcagaaccctccccaaatacaggcaaccagtgccatacagcaaatctcatctttatagatgtgtaaaatgaaaaccgaaacacaagcccaccacatacaggttaaaaaattcctgctgtggagaacagtttggcagtttctcaaatgttaaacatggagttaccatatgacctggcaattttactcctagccatacactctcaaaaagccacaactatgccgggtgcggtggctcacgtctgtaatcccagcactttgggaggctgaggtgggtggatcacctgaggtcaggagtttgagaccagcctggccaatatggcgaaaccttgtctctactaaaaatacaaaaaaatttagccgggcatggtggtgagtgctacctgtagtcccagctactcaggagactgaggcaggagaattgcttgaacctgggaggtggaggttgcagtgagcagagatcgtgccactgtaatccagcctgggcgacagagcaagaccttgtctcaaaaaaccaaaacaaacaaacaaaaaaccaaaaccagtaaccaaacagatatccgtacaccagtgttcatggcagcacagtttacaacagccaaatggtgggggcaacccaaatatgcattcccaagggatgggtggataatcaaaacctcattatctataggatataatatcattcagcctcaaaaaggaaagaaattctgacacatgctacaatgcagatgaaccttgaggacattacgctcagtgaaagaggccagacacaaaaggccaaatagtgcataattccatttataggaaatgtccagaataggcaaatccatagagacaggaagtggatgagttgttgccaggggctgcgggtaataagaggtgactgctcctgtgtctggggtttcttttgggtgctgaaagtgttctggaatgacacagaggcgatggttgcacaactctgtgaatgtactaaaagacactgaattgcacattttatttttaaacaattttttctgtgagcctatgaattatactgaagaatgaattgtacactttaaatgagtaaatttcatggtatgtgaattatatctaaattaaaaaaaacaacaacattaaaacagcagctgaccaccaattattctaaatcataaagataggttttgtgatgcctggccagtgctcagagcccacacagctgtctcagagcaagtctatctggctgtggcacagagccccggcagatagatgggctgtccgtctgaggaagaggccaatgtggggacctatagtgatacatgacagactggaccaagccaacctgaatgtgaaactctgaagcccaggacacaataaccatgacaatcagaaaggaatttagttcaagaagtttaatgagtaggcatttagccaagtggaaggttgttggctattctgaggacatttgatcttttttttttaattgtggtaaaatacacataacataaaatttatcattaatagcatttagtacattcacaatgtcatgcgaccatcactactctctagttccaaagacaaccctttacccattaagcagttgctccccactcccactcctctcagcccctggtaaccactaatctatttgtctccacaaatctgcctactgttgacacttcatataagtggaataataccctcccctggaaagcctgtcttttaaaaaatgattttcatttaaaaaagtttttttgcttaacacagtggctcatacctgtaatcttaggaaggcagaggcaggaggattgcttgggcccaggagttcgagatctgcctgggcaacatagtgagatcccgttattcacaaaaagggggaaaaaagaccaggaaaaaaaaaaatcccaaaactaaacaacgaaaaagttttttttagggagatagggtctcgctgtgctgcccaggctgggctcaagcgatcctcctgcctcaggctctcaagtagctgggactacagatgagctaccacgcccaacttagaaacatgtatttttttcagattagctcatcattccctggtaacttctccaatgatttccccttgcatctctgccactatattctagcagggttctcacactgatcctacacacaagtggttagagactcaccaggccaagctcacctccaattccaaatacctagtcctcaaggtccaagtggcctgtttccatagacactgacactgtgcatgacttttctgtcctcagctgctggctttctccatttcttgttgataatgtttttttcttacctttacatacttcatgtaaataagtttcacagacttttaacaaagtgttggctgcttttatcaaagaagagaaaatctgccaaaataaattttcaccatgaaggcaacacattttggggaacaagaaagggcagaaaggagatctcttttactagagaactctgcttaaggactggctcatttgatccaaacatctcatcagtaacttggagtgagtgcccttgttttcgtcatcttgcgtctcactagtgtaggtcagtccacatcagcctgcctgacgtacttggttcgtaatgctgacatctgagcccccatgtttatttcaccctgattctactgaaatgaccaacgaaatgcaaaacaggaggaaatatctctatcaatgccttcagaggaaccgctgtagaatgtggtgtggctgggatccatgcgagagaagcagctctcacacgattccaccacagttaaacacatgggcaaaggagggacctgccggaggtatgaggattccgtagcagagcccaagaaaatctgcaagatcagagaaactgggcctaagagccagactggcagaagtacggtttgccggtggcaaatagaaggacctgaaccaccagtgccctaggtggagaggtcagtgacaggctggccaggttttcctgggcactgctgggacagagagagacaccaatatagaggagattctacctgtctcaagaatctgccagcagcaccctgggtccccaccctgactccagctgctgccacaggggaagcagcagggactgaagctccaccccataaacaactctagggactggggatcaaacaagtaccaacaaattagtaactgtcctgtgtacaaatacaaattaggtggaaactataatgattgaacaccagtcattccagtcaagatcccaactggaggccgggcgcgatggctcaagcctgtaatcccagcactctgggaggctgaggcgggcagaacacgaggtcaggagttcgagaccagcctggccaacacagtgaaaccctgtctctactaaaaatacaaaaaaattttagcctggtgtggtggtgcgcgcctgtagtcccagctacttgggaggctgaggcaggagaatcgcttgaacccaggaggcggaggttacagtgagccgagattgtgccactgcactccagcctgggcaacacagcaagactctcgtctcaaaaaaagaaaaaagatctcaactggattttctttggaatctgacatttacctagaataggcatctgaggacagccagaaggagtgtgtgtgtgtgtgtgtgtgtgtgtgtgtgtgtgtgtgtgtgtgtgcagggggggggatggcttccttctggtagccactgctctagggagtatttctcaccatcatgtcacaaagcacacaacaggagcactctcacatggattagggaattagatgcagacctcctgcacaactgccctcttccagtcctagtaagataagacacaaaagaaaggcagggaaggagagtgtgaagggaagatttcagcacacaaaggaaaggggtgtaattcaaagcagtctgagaaaagactccagaggacaaagcagcagcaaagccaggctcctgccccgtcccccagaaaccaccctagggagcgggcaacgccctgggaatttgcagtcagtaagctggagagaagcaaccaagtgggagtccttcactttttccttttagacccagaaactccagctgggaggtgcaggagaaatggcaaagtgcccagtgagccagcccagctctgtgggaagcaactgctcttaggtatacacagattatggaaccacccagagactgaggtgccccctatccccatggaaatggcacacacatccctcgtgcagctagagtgagccttagtaagacatccaacacagttcttagaacaaagagaagaatccagatagggctgaagactacatggctgcagctccctccagcgtgcaaattctctccggatacaagataacaagcctgcacgcgatagctcagaggggaaaacagcaagagaagatgccaagaaactgggaagagagagccaagaattcctccactgtctcaaagcaaacagaacgactatgcagagccatccaagcctgagccaagacgaaaagaagtgacatggtaactaggcaaacatattatggccagaagaaaaaaaagaggcccagggagggagatggcacgagaaaggcaaagtctcccaccaagaagagaatacacaaggaagggaaaaaaattccccacaacttcataagaacatgttcccaataaaagagttcaaagatgggatgataaaacagaataagatgaaaagacaaatttccaacctagagaaacaaactgcagaccaaaacacatcattatgaaactaataaatacattgaaaaacagccagaaacagaatatacatagctgaaaatcaaattagacaaagtgaatgcagatgaaaaagacaaaagctaaaccaattacggcaaagctaatagcattggaagagagacaaagacaatccaacatgaggaatttgtgtccctgaagtacagaactcaacaaatggaacagaagatgctgtcaaagatccataagagagctgacctgaaacagcaacgactacatctgcagactgaaagaatacaccatgttcccaggacaatttgataaagaatgctcaatagcaagccagactctagtcaacctactcaacttcaaggataaagaaagcattcttcaggcaccttgggattcttccaagggggaaacatcagaagaccagacagaatgtctacaaagttctgaggcagcttagcgcagtggtggtgggggagaggtcagaggtaaattcagagagatggacaggggccaaaagcctctctgagaagacgaaatctgaacacagatctgaaggaagtgagtggtgagggagcaggtcaagtaaagaggggtccagccaatgaggagcagcaagagccaaggctctgactctagcaacattatggcaagttccaggaagagcaagagcagtgggagccaggtgagcaagggagagaatggtagagaatgagctcaaataggcaaggagggatcatgttccatgtggctgctgaggcaggcccagttacacaatttgtggagcctggtgcaaaatgaaaatgcagggcctcttgttcaaaaattaagaattttgagatggtgagagtagagtattaaaccaagcctgggttccagcaagcccatgggcagttacaaaggcccatgaagctggctctgctttcaagtaatggacttcgggttttattctgagagggtttttctcaagggagtaacctgatctaataaacatttttcaaagagcccatctgaggctgggcacactggtacacgcctgtaatcctgcattttgggaggccaaggcgggaggattgcttgagcctgggagttcgagaccagcccgggcaacatagggagaccccagtctctacaaaaaatataaaaattagccaggtgtggtggtgcatacctgtagtctcagctacttgggaggctgaggtgggaggactgcttgagcccaggaggttgaggctgcagtgagtcgtgactgtgccattgcattccagcctgggtgacaaagggagaccttatctcaaaaaaaaaaaaaaaaagcccattctaactatgggaagatatagagtagagggagtggggcaggagggcacaagatgccacaggggggctctgcagaagcagatgttgggtcacggtttgaggtgtaagatgttcatcaggaactgacatccataaagggaggtgggaagaagtcaaagagaaggccctataagggccttgtacccttacctcgctcagtcaccagggtgctgtcctggaaatggcgtgaccttgggtgaggaggctcttgcagctgaggctaaccggagtgtccgcagggcatccagagaggagagtgacctccgggtctgccacgtgagactactgcagagtctaggcagggatgcagggagctggtctaggtgccatccctgaagggcatgggcaccgggacagcgaaagggcgagagatccaggactctggcttccgtttctcatgtttttgatactgaggtatttagctttctagaggcctaaagggcagctggatgtatgaatctggagttcaggggagaggtctgaagagccaggcgagtgcgtgagggcgtgctgaatataagtgtaaacaaccctccccctgctatttggagttgtgatgaggagaaagaatcagcagaggagacagagaaagaggagtcagtgcagagaaggaagatcagacatatctgtcaagattattggtggcaatcaatagaaaccaactctagctgatttatgcagacaaggactgatgaaaagctattgaagatgcatgtggtgatggttgcacaatataaatgtgctcaataccacagaattgtacacttaaaaatggttaaggcagtacattttatcttttgtgtattttactgcaatttttaaaactagggggaaaaggctactgggtgataagagaatccctagagggttggaggaacaggtttgagtccagttggctaggaacaatacttcaaatccttctgccaagccagtccaaacagccagcactgcctgtgcgaccctgcaaggcagcagcactggccactggcactgtggcctaggagctcgtctttcctgcagccccaatgccaggagacacggctctcctgcctggccctgctcctcctagcatgtgagtctgactggcagaggccagggtacatacctacaccctcgtgtagaactcaggtaatttctttctgtaaggggccagatagtattttccaccttgtgggccagacagtatctgtcacaaccagcccacctgctgttgtacaggagagcagtcttggacaatgcacaaaggacggggtggaactgggtcctggtaaagcttcatttacgaaaacaggcagtgggccggacttggcccttgagataccgtttgccaactgctgccctgaccgaaagggaagctaggcaaataagcatctggcatttgcagtgactacaatcagaggtcgccaggcctcccatcaactcgtgaggtgagaattctcccaaacccagagggttcaagatgtgaggtgagatggccacctggagagtatgaggtaccagaagagacacaaggaaagggctgagaaggagtgacagccactgatgactgttaagattatttcatggaatgtggaaaagcaagtgttcatggagcaagctgagcaaggagcagcaggcaaggaagagggcccatgagtggagagaactcttagagagtttggctaaaaggagaaacagagactgagcaggagccaaggaggtatgcgctgaagggagctcagttacgatggtaaattctaaaacaagttcgtctggtgatgggcacagttcacaagaggagggaagaccaatggagtcccaggggcatcaaacagtggttgacactgcaagctgggaagacagtaagtcctcatcataggcagagctaagttagaactccgtgggtggagttccagagatgaccaactccaggatacgaccatgggaatgagtggcagaagagacagggaaggagccaggcactaggagggcggcctacatgcgtgtgtgtgctggagtcaggaactggcacggaatcctcaataagaggactgactggggcagtgagcaagcccacaatcaggggtctgtgggccgagaggctgtgtcacagtccccctatgccatgcctggaggcacatgggatcagagacctctgaggacttggcaggaggcacaggcgtggagaggcagggcctaacccaggtgtgtgtgtcgcgggggggaggggggcggtggttaggcagggctctttggggaagagatacctgacagggtcttcaaggataagcacgacaaggcaaggccacaggggaaggaaaggagaagagaaggggacttgggcaggggagccaatgacaaaggccaggagtgcaagaaacatggtacctgggaggaactacaagcagtcctggactgctgagggctatgtccataagaaaagcagcagcaacagaaggggccacaaagagaagcaggagccacatgaggggccctgatgtcactcaaacacagggtgccactcttgggtttaaagcaggggaatgagattgatgatagggattgtgtggaagatagagaggtggaggaaagatcataagttatcatgggagtcccagagcaagatgagggattgaaccaggacagcggtagaagggatgacagaagacaaaagagggacaaacagttaaaggaacaatttgtgggacttggtggctcccttggatgtgggcagtgaagggcaggggcctgttgggtttccagcttgggtgactggtatggctatcaactgtgacagaaaacagtggacatggcatttgtctatttggtcttctgatctaccttatcttgaaggagacaggggtggtagggcgcccagtgggttgagaagaatggaagggagaaagagggcagaaatctctcaaatgttttgcacagtaaaatctgactaaaatgcacacacgccccacaagcctttttctttttttttccccccaagaagcaaaacaagttttatttccatagtagttccttttagtgctctctgtcgccacctaatggatggcctggtggaagaggctcaagaggtagcagcctagcctattccacggcagaggaatcaaactcacccaggcagggagaacgggactgcacctgggtgggggaggaccaaaagaagcccagctgcttctggaagatcattgggagtctcttctggaagaccaggggctcttggagctaaaatagacgttcgttcattaataatacctacttcaacaacttaagatcatgttcagcggatgcacatcaaccttgacttgtctgtgctccccaaatcaatatgcctcaatattgaggcatattgagggaacaatctgtagatattcatgaaattgtctggtgggacaaaaattgtggggcacttgagcctagctgaactcagttttaagttctagcatttaacacaccacctctaagtttacgtgtactttatgagtgcaggaatgcaacaaaaaaatctagtgtaaagtcctggccctcagggcaaagcaagggaactacaactcttgctgcgaactgccttcctcccacagatgtggcacattcacaaatcacattcattgaacaagaaatggaacaagtgccacaccagaggtgacaagaagaggggaccatacaataataggtaacttccctgtcacacgagactgcttggagacaaggatacagagcccagcataggagatgggacaaaatgatgagggtcaaggaccacacctggtttaactcccagtgaagagttttagccagtaaagagctgcaagaaggaaatcacacaccacgaagaggccactaagataaacgcttgaatctgattaagttttcacctgaaaagtgtgggtaaggacaagcctgccttgttgggtagtacagattcagtgaatgagccctcagatcctgctggatcccgtgatcagataaacagcagcttctcaggaaccactgcatgtgaggttagggtgaggggagggacccgatggagatctaatcccaggggtttggtcacaggggctggcgaatgagaggtggagaccgggaacatacgccactttttttttttttttttttttttttgagacggggtctcactgtgtcacccaggctggagtgcagtggcaccatcttggctcactgcaacctccgccccccaggttcaagcgattctcctgcctcagccacccaagtagctgggattacaggcgcctgccactgcgcctggctagtttttctatttttagtagagacggggtttcaccatctcggccaggctggttttgaactcctgacctcgtgatccacccacctcggcctcccacagtgcggggattacaggcgtgagccactgcgcccggccagccactctttttttttgagatggagtttcgctcttgttggccgggctggaatgcaatggcacgatctcggctcactgcaccctccatctcccaggttcaagtgattctcctggctcagcctcccaagtagctgggattacaggcatgcgccaccacgcccagctaattttgtatttttagtagggacgggatttctccatgttggtcaggctggtcttgaactcctgacctcaggtgatccacctgccttggcctcccaaagtgctgggattacaggcatgagccaccaggcccagcctaagccactcttttggaaagctcagcagagaagatgcatgaggtaatacgacgcgttaggtggcctttaaagggatgtttatagcttttcataacatgggtgtattagtctgctcaagctataacaaaatagtacagactggggggcctattcaactgaaatttctcacagttctggaggctagaagtccaagatcaaggtgtcagcacattcagcccctggtgagggctctctttctgacttggagatggctgccttctcattgcatactcacatggtggagaaagcaagctctctgctgtctcttgttataaggacactaatctcatcatgcgaaacccaccctccctcctgatttcatctaaacctaaccacctctcaaataccccatctccaaataacatcacattggaggtttgagcttcaacactggaattttgggggacacaaacattcagtccataacagtgctgatgtttatgttttaatgttaaatgataacagcacagcacagcagcacacacactgtgtgatgccaatctgtttgtttgtttgtttgtttgtttttttagataggttctcactctgttgcctgggctatagcagtagtgtgatcacacctcactgcaacctcgacctccaggttcaagcaatcctcccacctcagcctctcaaagtgctgggattccaggcatgagccaccatgcctggcctccaatttgtatttaatgccactgaactgtacatttaaaaatggtaaattttaggtgatgtgtattttactacaatttttttaaaagtctaagagaaggcaagaaaggagaaggaaaatttaaaagaacagaaaatatggaaaaatagaatgcacaaatatgctataaatgaatctaaatacatcagaaatcaaatagatgttaaaggacgaaacagacaatggattttttaaaaaatctcgaggccgggtgcggtggctcacgcctgtaatcccagcactttgggaggctgaggcgggcggatcacgaggtcaggagatcgagaccatcctggctgacacggtgaaaccccgtctctactaaaaatacaaaaaaaaaaaaaaaaaaaaaatcagccacgcgtggtggcgggcacctgtagtcccagctactctggaggctgaagcaggagaatggcatgaacccggggggcggagcttgcagtgagccgagatcgcgccaccgcactccagcctgggcgacagagcaagactccgtctcaaaaaaaaaaaaaaaaaaaaaatctagctatcagctgggcatggtggctcacgtctgtaattccaacactttgggaggctgaggcgggtgatcagctgaggtgaggagtttgagaccagcctggccaacatggtgaaaccacatctctactaaaaatacaaaattagccgggtgtggtggcacgtgcctgtagtcccagctactcaggaggctgcggcaggagaattgttttgaacctgggaggtggaggttgcagtgagccgagatcacgccattgcactccagcctgggcaacaagagcaaaactccgtctcaaaaaaaaaaaatctagctatctgacattttcaaaagctccacctcactgatgcataaagacacagaaaggaggaaaataaaaaactgggatggccgggcgtggtggctcacacctgtaatcccaacacttttagaggccaaggctggtgaactgcttgagcccaggagtttgagaccagtctgggcaacatggcaaaaccctgtctctactaaaaatacaaaaacttagccaggcgcgctggtgcaagcctgtaatcccagctactcaggaggctgaggtgggaggaccacttgagcccaggaggcggaggttgcagtgagctgagattgcaccactgcactccagactgggtgacagagggagaccctgtctcaaaaaaaaaaaaaagaaagaaaaataaataaaataaataataatttaaaaaaaaataacatattagtatggtcgcttcataataccaaagggttcaatacaccaggaatgtgaaactgtatctaaaactgaaaatgtggcctcaaaataaataataaaatgaaaatgaccaaactctgtggagaaactgatgtgtccatcaccacagtaggttttaacacgtattccatcagttgataaatcaagtaaacaaaatgacagtaagaagagaaaatactttcacaacaaacggataagacagaggtaatgaatatatgtagaatcctgcacccatgcttggtggtgacatattctgtccactggttgtggataatgtgtcatggagcacttctcaaccaactgcaagaactggtgtcacacagaccaagttctttgatcacagtgccatttagttagaagttgattttttctttttttcttttttttttttgagacggagtattgctcttgttgcccaggctggagtacactggcacaatcttggctcactgtgaccactgcctcccggttcaagtgattctcctgcctcagcctcccgagtagctggaactacaggtgtgtgccaccatgcccggctaattttgtatttttagtagagacgaggttttggcatgttggccaggctggtctcgaactcctgacctcaggtgatctgcccgcctcggcctcccaaagtgctgggattacaggcatgagccacctcatgcagtcaatttttttttctagagcaactaggaaaaaaaaaaaacaaacccaaagccatgtgcttggaaattgaaaaacacattttaaaataatatgtgagtcaaaggaagaaacaaagaaaatttaaaatatctttgggctaacttaaagtgacaatactatcagaacttgctagatacagttgaagtagttccagagggttagccttaaatgtttacatttgaaaaaagggtagaaaaatcaatgaaccaaatttataacttaagaagttagggccaggcgtggtggctcatgcctgtaatcccagcactttgggaggccaaggcgggtggagcacctggcgtcagcagttcgagacccgcctggtcaacatgccaaaaccccatctctactaaaaatacaaaaaatttgccgggtgtggggcaaatgcctgtaaatctcagctactcgggaggttgaggcacgagaatcacttgaacccaggaggtggaggttgcagtgagctgagattgcactactgcactccagcctgggcgacagagcaagactctctctctcaaaacaaaaaacaaacaacaacaacaacaacaacaaaacacagagaatgtactctaagaccatagaaaaaataataaagataaaagcaaaagcagaatttaatgaactagaaaagagacacagagtaatacagggcaataatgcctacatgtctgcttcttgtaagaccaatgaacctaatgagcttttaccaagacaaggaaaaacgggagaaggtacaagtaaacaacaaacactaggaatgaaaaagcagacataattacagatgttgcaaatgtataaactataacatgaacaactttatgctagtcagacaaaatggacaaattcctagaaaaaaaaatttaacagcttacagtagcccaagcaggtgcagggaaaataaaaataggtttagatgtgtctgcgtgtacatagaacacctcaaaagacacagacaagaccctggatgcagccgttccctgaagagaggcctaggcagctgggagaccagggcagcagggacactcagaccttgcatcactctggagtttgcacttcctgaattgtgaagcatgcacatgtctcacttatgcaacagtgaatccaaacgtgcctgtatacaaggaaaggcctcacctggctgcgccgtggaggctggcctggcgtgtggagcaggcagaacattagcaagctaccgagcaggtgcaggtatgaacatcagctgacgctggctctttgctttctttttaatcttgacaaatttggtaggtgaaaaggcatcatttttgttctcgtttgcatctctttgattaccagcaggcagaactcttttcctatcttcattggccatctgtatctcttcttttatgaatttcctgttcatagtctttgttcattagtggtgactagtggtaagttagcaataagaactgtttgcattcaagtctagactgagaaggaaattaaaaaatctgcccatgtattctcacaataaatgactactgactagcctgagataattgtacccactgcccagtcacaggcattaagcctaggatgattcatttcagacttgtccctgaccttcctcataccctttccagaagggccccttgagctgctatgatactcctaaatcactatcccattacccaaatgatggagagccaatcaaaagcttagaccaggacgctttcccaaattatgtcccaataccttcacaatgatcactttatatacaatctcactgaatgctcagcaacacacgagagcaatgtttaactgagggcaacactgaggctcaaggagggcaagtgacttgattgctgaggtcacctgctaggtgcaagagctgagaattaatcccaaggctacctggctcaaaaagcctaagctcatctactatacttgaggcgaaatcatgaaagtgtgtttttaccttgcccagaccctgcacactgcatcaaggtcctgagtttcaagcaacagaaatcaactctggttaaattcaatcacaaaggagttcttgggcagcagatctggaaatggagagagaactagagaactaggctcagaaaagcagcaggaatagaggctgcaccactgcaaacacagccaaggttatactgcagggacctgctggttgggacacccaccctgggcactgttgcatgtcatcactggacattagccaccactgctggttttgtgactcaactgccaccaccatgactaatccctcactgtccctcaagagtcaaagtccctgaaggcagaatgggtttggccaaacctaggcttcatcgccatcccctagtttccagagagcaaggggagggaatatatccattcccctgtggcaggcactgccagttgtcccccaacatccatgttctccatctgccttactaatgagaccctgcgctcagctaaggagagttattccccgcttcccagcagaccatgggactacgttatggctaaggagacagtggccgagtgcactcctgttcatcgttctctttcaagcttgctcttgttctactgactatgggcggagcacacctcccacccactgactctgggcttgctcacgtgttgatgggatgggggaagaagaggctttaagaggcttctgtgactctgctcactcctcttggactcctgacctccgcctacgaagagacttcccctggcagctgcttctccctcctgggtcctggaacgacaggcttgagaacagatctgaatcccatcttgcagctgacccagacccatgtgtgagaaataataattgctgttatagctactgagctgctggtgctgtttgttccctaggacaagatgatgggtgtgaagatggaaatggaaatattgaatgggcctagaagttaagatgtcaagtgccattttgcctttcccctatgacctctttcttcctacctggaggagtggatgcaatgactagagcagcaaccgtcatctcacaaccaagaggcaatcttgagaaatggaagacacccactgaggggccctgggtcctggatccttacaaagccactgcagtggtcatggacagcatgagaaggaagtacaccacaggcccccaaccccatcttcaggttttcttaggtagaaactagggtccacctgcctcttactaagatatacacaatggggagacttttaacacaaaaaaaggtatgaagatggtcagaagccaaaaaagcaacaaaatgttcatgatatgccgtatgtggggtttactcactacactgcttttccaccgagttagcataatcactataactcaacccattgaaaaaatgacaaaacagattctgagattctcttcctatttctgttagctaaaaaagcagcctttgaattgtttataagtgaattcaagagataaaaataaacccagataattcagaatgtactgagtacaacacatatgccttctatgtgataagctcccagcattatttattcaaagaaaacttgccttgttgcaaaaatataaaaaaacttaaaaaaaaaaaacaagtaattacacaacacaccacctcctacaacaccagattccttttctttcctttgtaacctgaccagaagaaaaacaaaacattgttcaaattgctgagacccacaaagttcaattagagcataaaaaatgctctcccaaaatatagctactagcagggaaatgagcaggctaagcctcctggtgaacctggacattgggcacaagtaacaggcacatttagacaccaacgaccagattccacatgactgaatccagaaaccctgccccttcccattcccttggagatccagggggacgccatcaattgctcactccttctccttacacatacagttaggggtgctatactatacaggggaaggcgtgaggaagtcacacatgctttggtgttcaagaagctcataaagccattagggaaagagcaacatgccagaaagcagttgtctcttctggctacagaggttgcaaaagacgtctgcaagggtcagtgagggcccaaaggagtagtaaccaaggccctgaagcctgcctgggagctgaggtgggcagtatcagcctcttctcaataatcagttcctaaggttccatccgagaaagtagaaaaccacagaggccattctcatgggtactttaagcagtacatctgttggcaaaacacaaatgttgttacacaaatactaagccacagattgcaaaggcacctgacagcctttaaaattcatttctcttgtttcgcaaagctgcactgggaaactgtgctgttaaattctacactcataaaggaggtatgttttaaaagaggggcaaatatgtgggtgctatttagactctcattgatttgttccatgttttcagataactacacacccctccgcccccgccaaagtaactcaatctccacatatttgcctttatatgtaccttctaactcatgactatggctttgattatctcataaacaatattgttcctgttagccatggagaagctaaggagccaacagcagagcaggctgcatgttcttctgtccctcttataagacaaaaccttagagcaatgtcccactgcagaatttatttgttaattcactcaataaattaaaatatgcatgattctaggcactggggatatattgaggaagaggcaaaaaaaaaaatctctgtcctcatgggactcagattctataggggtggggagagggagggaggggaagggagtgggagagcacaaacaaaaccaagcagtaacacagcttgtggcagatggtgacaagtcctatgctaggcagggggaactggtggggcagaggcaggctgcctgacttacagacatgggtgtgctcggggaaggccacattgggaaggtgacacttgagcagacatgtgtgatacctgggacagagggcagaggagaggtcaaggccttgaggcaggggcatacttggagggtccagggaggagccaggaggccagtgaggccgcagtgcatgagtggtgggagagtggcaagagaggtgatcctgttgggctgtgactctgagcaagcagggacccactggagggttctgaacagaagagcacaatattgcaggactaaacaaagaaccagggggcaagggcagaggcagggaagctggacacctggaccagggtgggggccatggaggcaggggaactcatgagattttgtatccatcttgcaggtggagtaacagtatttgtgaacaaatgaggtaaccagcgccaggtttctggcctgaggagcaggagttggagttgctgtttactggaaaggagaagaccagggaaagagaaggtctagggaggataaggagttcccgtgacccagtcagcctggagacataaatttgggagccatgaggctggacggaatcacttcgggagtgagggtggagaagaaaagcctgaacctgaggccttccaacatcacatgcgaaacagaaaagaccgaggaggacagacattcacacactcacctaggacttcctgaggacccacagacaccaggcactgttctaggagcttgagctacatctgtgaatcaaggagacaatcctgtcctgtggagcttctgctccagcaggggtgacagctaagataagcacagtcagtcatgtattcagctagaaagagacaaaagctgtggtttgcactgagaaggtgcacatcagtgcagagactcaagggagggaaaggattgtctcgtatgggtattggggttaactgacgacgacagctctgggaaaagaagtgacaagcagctcccagatttaacaacatgaaggtcatcactggagacctcatggagcagcttggcagagctgtggcagcaaaggaacaactggagaaggttgaagagggtgtggagacagggactggagtcttgctggtaaaggaaaacagagatgctagacaggtggggggttgggagcagcttttgtcaaggtgggagaagtagcaacaagtttctagggcaggcgagggaggaatctctgatgggggagagtgcagtagaggactggagagatgccttagaacaggagtgagggcctgggacaggcgctccgtgacagcatgagggaggcagagcgaaggagtagacgctggcctgtagacactctcttgagcttgcttctgtgctctctgggaactaagatatcagctgcaaggaggtgtgacagctgatgaggagggtgggaggggctaggagagaccggggaactgcagtatgcaggtgggcttggcggcaagaagtttacctggggtagacatgaacttaaagggggaatcaatgaaggagtcacattcagcttcaggacggagcaggcatggggcagacatgactgaatttcatgaggctggggctttgtcgactgaatataacaaagcaagaaagtgccgaagggctgaggtagtgtgccagggagtaacgacgtctgactggcactgaagctacaaaggagaggaataaggatacgaaggaggtgaagtctgagaaaagatggagccactgatggattctaagtgcctgtgaggtcaaaggagtattggagttgggtattagaggcagtgaaaaggaaaaggatctccttttgcagatcacaaaaaagataaaatgaccagagctaaacaacttttacagcactatccactgtaaaagttgtttgagaaaaaataaaatgtagccagccttcagagcatatatgcatctttattttattttatttattgagaccaagtctcactctgtcgcccaggctggagtgcagtggcacagtctcaattcactgcaacctccgcctctggggttcaagcgattctcctgcctcagcctcctgagtagctgtgattacaggcacccgccaccacacccggctaatttttatacttttagtagagacggtgtttcaccatgttggccaggctggtcttgaacccctgacctcaggtgatctgcccgccttggcctcccaaagtgctgggattacaggtgtgagccaccacacccagcccagagcatatgcatctttaaaaagttgtcttcggccaggcacggtggctcacacctgtaatcccggcactttgggaggcagaggcaggcggatcacctgaggtcaggagtttgagaccagtctgactagcatggtgaaaccccgtctctactaaaataaaaaaaattagccaggcgtggtggtgcatgcctgtaatcctggctacttgggaggctgaggcaggagaatcgcttgaacccgggaatgcggaggttgcagtgagccgagatcacaccattgcactccagcctgggcaacaagagtgaaactccgtctcaaacaaaacaaacaaacaaaaagttgtcttcaagagcataatcaaagatactttcacttcttaatgttttgtttccatgtctcgtcacagaacatggtacagacaaatattagaatagactcaagggatcacttgattttaactacagaaactttccggtgaatcatgagcactgtcttgtttccagctgctgaagtatatgggcaccagacaagagcacagcgctgtcactcaaagccaggagtaatatggctgttaccatgaggactacttagcagaagataagcatctcattatgtctacagtgaactaaactattgttgccaatggtatatggattaggaccgactgccactgcccatctgcttatagcttagaatctggtgaatgcaaacaactgttttggggggacttctggcccttccttgggctctgctatcctggaaatggacaggcttctacaggggttcgatggtagccccgaatagttaggtgtatgtcttaacccccagaccctgtggctctgaccttatttggaaggtctttgcttctgtaattaagtgaaggatcttgatatgagatcatcctggatttagggtgggcctaatacagtgacaagcatccagagaagaatacggggacacagagaaggccatgtgaagacacaagcagagaatggagcaatgcaactgcaagccaaggaaagtctaggactgccaggcagccaccaaaagctggaagaggcaaggaaggatccatgctagaggctctggggggaatggagccctgcaacatcttgatttcagacccctggcttcctgcactgtgcaagaatacagttaggggtactttattctgactactccataaacttaagctctaattctcgctcagcttctgagctttaacaaagggtccgtgcaacttctaccgttcccgttccccgtctttaccaaagaggaagcatttactcaaagcccacctcctgcaacagctctagatgccgcttcccccctccacacaaggagtctgctcctccaggtccccatttcctccttctcacgctcccctctctcctgggccattcccagaaggatgtaaacatgctctcatattcacccacgtgaaaaacaccctcatccccctctaccccactcctatttttctggtcaccatcacaacaaaacttcttaaagagagttgtctatacccaatctccactccctcaccttccactcactccaatctggcttctgtccccatcacctctaattcagttcaccatgtgacaggtagggtttttgctagttttagacataatggatcttgttattcctgggctttaaagccttcaccagaggatggccaactgcctacatgtaattgccacttgacccttcaaacctcaaagaaaccgaagtacagacatatgaaagggaagaaatttctaacagaggcaatagcaggagaggacctctgaacggataagatacactcagcaaatttctagatgctggaagtaggcaagaacatgttgactaatggaacagagaggaatgtactacaagagagctgtagagcagatgagagcctgtatacctgtcagagccccaaagaagctctcagaccagaccagaccagaccagaccagaccagacgagaggaggggcaagcagtgctgtcatgtgtgcaacacctgggggctgctgactgccagatcccgacccacaagctttggggcagggcaccttcaataagctcccaggtgaggctgatgctgttggggctggtgagcagagcaaacttggagtggcaaggtgccacttcttccctcaggcaagaaatcaatgggtcttttctaaatcaacagctagaaccttcccttccccggcccccaccccacccaccccaaaggctcttgatgtggctggcagcagcccaggtgatgcctaccttttcccagtctctgagggtccatggggcaagagctgacccctgcctcgcctccacagaacttctccaaaccacccttcagagacagaccccgcaggcaacgggccactccaccacagcagagaaggggcagcgcagcagctacccaggtcctccccccatccctggcggctcaagaaccagccccatggaagagagaccaagtctgtccttagaggaaacaaataatattctcagagaaatcttagaatacagaatagtcataaaatcagaacagaaacacccataaacaagaaataaacagatgataaaagaaaagtatcaggcagggcatggtggctcatctctggtgacaccacaccaggcgtggtggcccagcactttggggggcagaggtgggaggatcacttgagcccaggagttcaagaccagcctagacaacacagacacacaccagcccatgtctacaaaaaatttaaaaattagccaggcatagtggcacgtgcttgtagtcctagctacgcaggaggctgaggcaggaagaccacttgagcccaggagttcgagtctgcagtgagctatgtatgatggcaccactgcactccagcctaggtgacacagtgagactctgtctcaaaaaaaaaaaaaaaagtatccattaaaatattttcaccctttaaaaatcaggttgtctttttattaccgagttataggaattcttctgaatacaaatcctttgtcagatatgactttctattttttctatgactggtctcaactgttttcttggtggacttgtcttttcattttctttgagacagggtctcactcagtcacccaggctggggtgcggtggcgcgacctcagctcactgcagccttgacctccttgggatcaagcaatcctcctgcctctgcttcccgagtagctgggactatggactacgggtgcacgccaccatggttggctaattttttgtatcttttgtagagatgggatttcactgttgcccaggctggtcttgaactcctgagctcaagcaatccatctgccttgtactcccaaagtgctgggattacaagcatgagccacagctctcagcctattttcttttgttttttctttttctttttttttttaagagacactgtctcactatattgcctatgttggcctagaactcctgggctcaagtgatcctcctgcctcagcctctcaagtacccagtagtgactacaggcaagcctcaccacgcccagctctgtcttttcattttcttaatggtatcttttgaggaccaaaagttttaaattttaatgaagtccaatttattttttcttttaatagctattgcttcatgtatcctaataaatctttttttggcctggcacggtggctcatacctgtaatcccagcactttgggaggccgaggcaggcagatcacttgaggtcaggagtttgagaccagcctggccaacatggcaaaaccctgcctctactaaaaatacaaaaattagccaggcatggtggcgcacacctgtaatcccagctacttggaaggctgaggcatgggaatcgcttgaactcgggaggcagaggttgcagtgagctgagatcgcaccactgcactccagcctgggcaacagagtgaaattgtgtttaaaaaaaaccttattctttggactgcacagatattctcctatgttttcttgcagaagctttatatttttagcttttaaaacatttaggtctataatctctcatgaattaatttttatgtatggtgtgaagtagtgtcatgggttggactatgtcccccaaaaaagatatgttgaagtcctaaccctcagtacctcacactgagaccttagttggaaacagcgttgttgcaggtgtaattagttaaggtgaggtcacactggagtagggcaggccccaatccaatattactgttgttcttacaagaaggaggccatgtaaagacagagacatacatggagaatgctgtgtgatgaggaagacagatattgaagtaatgcagctgcaaatcaaagaatgccaaaggttgccaaccactggaagctaggaagaggcaaggaaggactcccctacaggtttcacagagaccatggccctgatgacagttgattttggacttctagactctggaattatgagacagcaaatttctgtggttttgttttgagacggagtctcactctgtcacccaggctggagtgcagtggtgcaatcttggctcagtgcaacctcccaggttcatgcaattctcctgcctcagcctcctggctagctgggattatatgtgtgcaccactacacctgactaagttttttgtatttttagtagagacaaagtttcaccacgttggccaggctagtcttgcactcctgacctcaggtgatctgcccgactcggcctcccaaaggccgggattacaggcgtcagccaccgcacccagccaaatttctgtggttttaagccacctagtttgtggcaactctaagaaactaatatttagggtaaggtcaaggttcatttttgtctggtatggatgtcatttgccatcatccggcacgtgctaaaagactttcctttcccgcaccggactgttctggtgcctctgttaaaaatcaaatgactataaagtcacatcacataagccccttaattttgttctctttcaagtttactttggatgttctaggtcctttgcatttccatatacgttttatttatttatttatttgaggcaaagtctcactctgttgcccaggcgggcgtgcagtggcatgatcttggctcactgcaacctccacctccgggttcaagtgattctcatgcctcagcctcccaagtagctgggattacaggtgtgtgccaccatgtctggctaatttttgtattttttgtagagacggggtttcgtcatgttagccaggctggtctcaaattcctgacctcaagtcatctgtctgcctcagcctcccaaagtgctggtttacaggcataagccaccgtgcccagcttccatatacattttacaatcaatttctacaaaaaaaaccctgcagttatgactggggttatgaatctacagttcaatgaagggagaactgacactgtaaagacacttagtctttcagctgatgaacatggtacaacattccatttatttaggtctttaatttctttcagcaacattttcagtttcagcgtgtaaatcttgtacatttcttattaaattattcctaacgatattgcatttgaaatttcatttctgattagtttttgaatgatctcgtaccctgagaccttgctgaattcactttttagttctagcaggttctgatagtttctttcacattttcgacattacctacaaatagaaacagttttacttcctttaaatattaatgcctcttatgttttttcttgcctcattatactggctatgacctctagtataatgttgaatagaagtggttagagtggacatctttgcctttttcctgattttcggggtaacatgttcaatatttcacaattaagtacaatctatctgtagctctttcatacatgcacttcctctatttctaatctgctgaatttttatcatgaaagggcactgaattttgtcagatgcgttttctgtatttattgaatagactatatggtttttctcctttattatcttttttttttttttttttttttttggatactgggtctcactgttgcccaggctagaatgcattggcgtgatctcagcttactgcaacctccgcctcttggtttcaaggattcacctgcctcagcctcccgaatagctgggactaaaggtgcgtgccaccctgcccggctaatttttctatttttagtagagacaggatttcactatgttggccaggctgctctcaaactcctggcctcaagtgatctgtccacctcggcttctgaaagtgctgggattacaggtgtgagccaccgcacccggcctcctttattatcttaatgtggtgaattacaccaactgatttttgaatgttgaagcacactcgtgtttctgcgaaaagcctcttggttgtaatatgcaggcgcacctcatttgattgtgctttgctttactgtacttcgcagatactgagtttttaacaaattgaaggtgtgtggcaaccctgcatcaagcaagtttaccagtgccatttttccaatagcatgtgcttacttcatgtctctgtcacattttggtaattttcacaatgtttcaaatttctcattattatatttgttatggtgatctgtgatcaatgctctctgatgttactactatcatcattttgcggcaccacaaactgcacccataaaagatggcaaacttggccgggcggggtggctcacgcctgtaatcccagcactttgggaggctgagccgggcagatcacctgaggtcaggagttggagaccagcctggccaacatggtgaaaccccgtctctactaaaaatacaaaaaacaagctgggcgtgctggcacatgcctgtagtcccagctactcgggaggctgaggcaggagaatcgcttgaatccaggaggcagagactgcagtgagccgagattgcatcactgcactccagcctgggtgatggagtgagactccatctcaaaaaataaaaaaaataaaaaaggtggcaaacttggccaggcggcagtggcttacgcctgtaatccccgcactttgggaggccaaggcgggtggatcacttgaggtcaggaattcgagaccagcctggccaacatggcaaaccctgtctctactaaaaaatataaaaattagctgggtatggtggcgcacgcttgtaataccagctactcgggaggttgaggcaggagaattgcttgagcccaggaggcagaggttgcagtgaactgagatcatgccactgcatgccagcctgggtgacagagcaagactgtctcaaaaaaaaaaaagaaaaagaaaaagaaaagatggcaaaacttaagtgataaatgtgtatattctgactactccaccaatcagctgttcccccatctctctctctctccttgggcctccctattcccttggacaagacagtactgaaattaggccaattaataaccctacaatggcctctaagcattcaagtaaaaggaagagtcatatgtctttctctttaaaccaaaaaccaaatgatcaggcttagtgagaggcatgttgaaagccgagaagccaaaagctaggcctcttgtaccaaagttagccaagttgtgaatcaaagttcttgaaggaaactaaaagtgctactccagtgaacacacaaatgatatgaaagtgaaatagccttattactaataaacgttaaggaagttttaatggtctggataaaagatcaaatcaaacacaacatttccttaaggcaaagcctaatctagtgcaaggccctaactctcttcaattctatgaaggctgagagaggtgaggaagctgcaaagtgtattgtttaatttttaaatatttggggctttctctggatcttccattatttcttttttttccccccactcactctgttgtccgggtaggagtacagtggcacaaccacagctcactgcagcttcaaactcttaggttcaagcagtccctccacctcagcttcctgagtagctgggactacaggcgagcgccgccatgcccagctatttatcgtaatattggtattataattttgtaattttatgtctattacaagataaagcaaataagtaactatgttaacattagtaagacccaacattttcagtgtaaggaaaagatatatacagatcaaataaaagttggccaggcatggtggctcacacctgtaatcccagcactttgggaaatcgagatgggaggatcacttgaggccaggagttcgagaccagcctgggcaacgcaacgagaccccccatctctacaaaaaatttttaaaaattagctgggcatggtgatatgcacctgtagtcttagctactcgggaggctgagggaggaggattgtttgaagcctaggcatttgaagctgcagtgaattaggattgtaccactgcaccactccagcctgggcaatagagcaagaccctgcctcaaaaaaaagaaaaaaaaaaaaaaaagttaaggaagaaccctgtaatgttaaattgccatagaagacatcattatgtatttatgacttaaaaaaaaaatggagggcacagtggctcacatctgtaatcccagcactttggtttttttatttttcttttgtgaaaatatttaccagcagtttgccctgacagatgtaatcccagcactttgggaggctgaggtgggaggatcgcttgagctcagttcgaaaccagcttgggcaacatagtgagaccttgtctctacaaaaaaattaaaaataaaaaataaaaactgaatatattttctagcgatgtcctctgaaagtgcctagatataatgttaccccagtaagaatcagcacatttagtacccacatgttggattctaaataccgttgccactataaggaaccagagctccttggaatcagttctaggacacgaaaagcacatattgggatggaatatcttgtgccagaaaacaagaaattgctcaaagactaattaatgagggtatgccaggagaatataggaaccaacatgaagggactcttgttgacccaatttgaattgtaaaacatttaataaataaatccctatgagtccatattgacatgaaagagaaaaggaaacacaacagcaaatattttgccaccatttgaggtgattattctaccaactccttactctgaaatgtaataaaggcaaagattaagcatctatactgtctttttaggaggaaatataatgcctccttatttgatgagggaaaattcattacagaggaatgacagtactaaatgtagaagaggtgacaattaaaaaaactatcattttgcaacccccaatgtaataatggtttcaggcaaggatcaatgaatgctaaaataattatgcaaatggctgttgggcaataggatatttgtatggtgccaaagcatcacatcacagattatatatcaattaccacaggaaaactgtatgtctacaatggggagatttggcagtcacctccttctttaatcaagtgttaaaacgtagcatcacaaaccacagggtaaccaaccattaagtgcctggtgagctgatgctatatgaagtacacagtactgcctatgaaatattcttgcccaaaatgtttaacctgaacatgcctgtagacctaacttcttgtctacaagtaatatatatggacaaacaagttaaattatatcacaagaaaagagagacatctaaaatgtgggccagctagtcgtggtggcacaagcctgtagtcccagctacctgggaggctgaggcaggaggattacttgaggccaggagttcaaggccagcctaggcaacatagtgacacgccatctctaaaaatatgtatcttaaaatgtgggcccttctagatgacaattgggctgactgcttcaaaaagtcagtatcacaagtgaaggagaggtgggtaggctgttcttgttaaaagagacaaaggggctgggcatggtggctcacgcctataatcctagaactttgggaggccgaggcgggcagatcacttgaggtcaggagttcaaaaccagcctggccaacatggtttagtagaaaccctgtctctactaaaaatacaaaaaagttagctgggcgtggtggtgcgtacctgtaatcccagctatttgggaggctgaggcaggagaatcgcttgaacctggaaggcggaggttgcagtgagctgagatcacaccactgcactccagcctgggagacagcgagactctgtctcaaaataaaataaataaataaataagagacaaaggaagcatattcaaatgcaatgtataaatcttaattgctttggagcccctcaacagcgataagagacatttggaggaaatctgaatttaaagtgggtgcctgataacattagagaattattgttaacttttaaagatgtgatcggggtattgtgcttatattggaaaatgtccttatttttaggagatgtatactgaagtacttaggggtgaaatgtcgtgacatctgtgagttccttttaaatggtgagcaaaaaggtataaaaatgcaccctatctatacagaccaggaaaatacgccaaaatgttaacaattgtctaatctaggcagtaggcacacaggcttcacagtaagttaaaaaaaaaaaaaaaaaggtttggctgaaataaagaatttaacagaagggatagaaaataaagtcaggaggctgggtgcggtggctcacaccactttgggaggctgaggcgggcggatcacttgaggtcaggagttcgagaccagcctggcaacatggtgaaaccccatctctattaaaaatacaaaaattagccgggcgtggtggtgcaggtctgtaatcccagctacgtgggaggcagaggcagaattgcttgaacctggaaggcagaggttgcagtgagccgagatcaggctactgcactccagcctgggtgacagagcaagactctgcctcaaaaaaaaagaaaaaaggaaaaagaaaataaatgcaggagatcttccaaaattcagagcaccccccaccgcccaataaatgaaaaatatgagagaagacagaagaccaatataagaggtccaaagttaaacagtagtccccatagagaaaatgaaagcatgtaaattagtaatttttttttaaaaaaaagagttgacaaaagtattcagattgaatgaccacagtacaacgagtgaacaagacacaactctagacatattctcatgagatttcaggacactaaaaataaggagacgaaatcctaaaaacttccagggaaggaagagaaaagaagggcacctacaaaagaaccataataagattggcatcaggcatttgttgcatttgttactctgcatactagaagagatgcctccaaagttaggagaaaaaatgattttcaacttggaaccctatactcagccaatcaagtgtaagagtagaagaaaggtatttcaggcatgcagtgactcagaagacctatctgttacaatgcttttggttacaagtaacagaaaagaaaactgaagctggctcattcagtaagaaagtccatcctatctgagtccctagctcaggtaggacaggccccagccacagtgcaatcaccagctaagcaacggcatcaagacccaggttcttcccgtttctctgctccgccttccttggtgagcaggctttatcctcaggctttgtccctcagtctgaggttacagaagagcccccagcaacacctttctcacttactccagtgagagaaaaagagaaagtcttccctgaacgtgccatggaagtccttcccttcagtctgagtgaaccaacttagatcgtatgtccatccttgaccagtaacagttgccaaaggaatgcaatgtgtggaatgacttaaggatcctttctgaagttgggaataaggtagaaaggtgaataatatcaggattctgttaggaatgggcaaagaagaaatggatatggggtaggtgacaacggtatccactacagtttactccccatgcactctatctgagcacattatttaaggatgcagtccagaaaacgagggagtaaaccatgtgaaaggaagatatgggttttaagacacgggctccaacccaagagcccagtgaggagaaggtccaggtacagctgtatatgcaaccttaaatcaaagagcagatacttgcccagattgcagaagggcagaggccttccaagagaaaggtcttcagtggggaaaaagccgaatcgtacgaaataaacagcactgctaatagcattttacaacataatcaaggaggaatagtaaacaaaataaaaaggcaactagaaatggtgggcaaaacaaagagctatataagcaagccaaggtttgaatatgaagtagattaaatcctagcaaggattttaagcaggtgacagagtctaagaaaagggaatccatttgaccttgattggtcattctcctttgagtggtccagatctgtaaagaaggaaatgtaatcctgggcacattcattatttggtctcgccaagaacaatactcacatgtgtaataatgtaaataatgttattttcgactttagaattaagctacaacttggctgtggttgcagggcagaacacacatgttaacaaatgcaagaatgggtatggtcaagtacagcttttaagacgcagaagttaaggagggaaagtggaaggaaaagtagggttattaatatccttatcttaaaaagaggggaactgacatatggactaaaatactgtttaaaatttacagagaaatgtgggcttggcatggtagctcacacctgtaatcccagcactttgggaggccaaggcaggcagatcacctgaggtcaggagtttaagaccagcctggccaacatggtgaaaccccgcctctactaaaaatacaaaaattagcccagtgcactggtgtgcgcctgtagtcccagctactcaggaggctgaggcacgagaattgcttgaacccgggaggcagaggtttcagtgagccgagatcacatcactgcactccagcctgggcgacagagtgagactccatctcaaaaaaaaaattacagagaaatgtgaatatgaatttcaacatggggaggtaacgtaagctaagtcattctctttcatttcagggagttaacacagttccctaaagttggcaaatcaagaaagatgtataagcatatgatttaattttggaggtaaccatcaaaggaactaaaatcagaaacagttaaaagctgtcatgtctgagtcagggaagggaaggggaaggggtagactgctgtttttacgatgacctcttttgttatatctaacttgttgccgagtagttgcaatattttgataaaaattcaaaacccaaaccaccttacccttcatgttttctatcgctctgatgttaacattcaaaatcctgcatgatccagcccctgttgacctctctgatggcccggaccctttgccactctcccctaacccctcgttcagctcctgccacacaggactaagctcttgccagactgagggccttcacacatgctcttctccatctggaaagcctttttcctctctgcaccttgcccacttctgttcaaccctcggttccctgcatcggcgttgcctccttggggaaggcaggctgagctgttcccccattgtacagtcatgagtcgctcaacaacagggatatgttctgagaaatgtgtcattgggcgatttatttgtgctaacatcagagagtgttcttacacaaatctagatggtgtagcatactacacacctaggctatacggtatatagcctattgctcctgggctataaaactgtacagcatggtactatactgaatactgtagatcactggaacacaatggtaagtatttgtatatctaaacatagaaaaggtacagtaaaaatatggcattctaatcttatgggaacaccactgtatgtgtgctctgttgtcggttgaaacgttgttgtgcagcacgtgactgtagaggactggagtggctcccacctccatacttgtccttctgaacacttaagtactggtacaattatctaagatctgtctctgccgctaaagtcaagctccatgaggacaggtaccaaatctgtctaggttaccccatccctgcctaacacagggcctgaggtactatagataccttacttactcaattgtggaatgaattgatggactatagcctgatgtactgcaaatccttcagcatgcagcaggaatggaacttggtgtttaaactaaactataatggctagatgaaaaagagactaaatgtgaaataattccatcattcagaattgagtgttggtataacaaacagacccatgaaatatgtagcgtttcacaaggatatcagtgaggaagttgttcaatatgtcatccgaagtcccgttgcataatgatacttgcacacgcatgcttatagcagcacaattcacaattacaaaaatatagaaccagcccaaatgcccatcaatcagaaagtgaatagagaaattgtggcatatatatacaaaggaatactactcagccataaaaaggaatgacttaatggcattcacagcaacctggatggaactagagactattattctaagtgaagtaactcaggaatggaaaaccaaacaccgtatgttctcactcataagtgggagctaagctatgaggatgcaaaggcatcagaatgatacaatggactttggggacttgagggaaagggtgggagggggtgagggataaaagactacaaattgggttcagtgtacactgctcgggtgatgggtgcaccaaaatctcagaaatcaccattaaagaacttactcatgtcaccaaataccacctgttcccctaaaatctatgggaataaaaaattaagaaaataaataaaattttaaaaggaaggtcatccctacacttcaagttataaaataattctaccgtaaaaaaaaaaaaaacacacacacacacaacaacaacaaagtcctgttgcgtacctctgagaggtgttttgtggcttggactagcatactggcagtgcagatgctgagaagtggttggcctaacaggacttgctgacagatcagggatgatgagagaaagagcagaatcagggcgggtgcagtggctcacgcctgtaatcccagcactttgggaggctgaggtgggcggatcacaaggtcaggagttcaggaccagcctggccaacatggtgaaaccccatctctactaaaaatacaaaaaattagccaggcccagctactcaggaggttggggcagaagaattgcttgaacccgggaggcggaggttgcagtgagccaagattgcaccactgcactccagcctggatgacgagaatgagactccgtatcaaaaaaaaaaaagaggccgggcgcggtggctcacgcctgtaatcccagcactttgggaggccgaggcgggtggatcatgaggtcaggagatcgagaccatcctggctaacaaggtgaaaccccgtctctactaaaaatacaaaaaattagccgggcgcggtggcgggcgcctgtagtcccagctactcgggaggctgaggcaggagaatggcgtgaacccgggaagcggagcttgcagtgagccgagatcgcgccactgcagtccgcagtccggcctgggcgacagagcgagactccgtctcaaaaaaaaaaaaaaaaagaaagagcagaatcaaggatgactcctagaattttggactgagtaactgggtggatgttgatattgtttactgaaatagagacaacatgaggaataggtttgaagggggaaaaaaatcaagactgggacttgttaaatttgagacacttatgagcaactcaagtaaatgctgacgaggccatcaaatctggagctcaagagagaggtttgaaatgcagaaacagggttgtagccatcagcaggcagacatatcatcattcagagtcatgaacatgcagaaataatggaaatgcctcttaattaaatgaaggcatagacatacaacgaaatgttatgtgattactaaaaatgatggtagaaaaacattatccagaagttatctttatctgtagatgacagatttatggacaatttttacttttcatctttgcatattttctgaaaattttttgtccattgaacatgtattacttttataataagaaaatgcaggctgggcacagtggctcacgactgtaatcccagcactttgggaggccaaggcaggaagatcacttgaggccagcagtttgaggccagcctgggcaacatagtgaaatcccatttctgcaaaaaatattttaaaaattagccaggcgtcgtgacatgtgcctgtagtcttagctatcttggaggctgaggtaggtggaatacttgaaactggaggtggaggctgtagtgagctgtgacatcactgcactccagcctgagcaacagagcaagagcctgtctcaaaacaaaaacaaaaacaaaaaagaaaatgcaagttaagttattttcattttagggaaaagtgaagatatacgtctatttttatggacatggatatttacaacattttgttgaggaaaggtagcaagttacaaaagtacatatatgatctcattcatctaaaacaatatgtgggccaggcacagaggtgcacacttgtaatcccggcactttgggaggccgaggcggaaggatcgtttgagcaaaggagtttgagaccagtctgggcaacatggtgaaactccgtctctacaaaaaaaatacaaaaattagctgggcatggtagcggacacctgtagtcccacctacttgggaggctgattgggaggatcacttgcacccaagaggtcgaagctgtagtgagctgtgattgcaccactgtgctccagcttgggcgacagaccttgtctcaaaacaacaacaacatgtgtacgtgcttacaggcaaataagaaagactctagaaggatgtttaaaatgccaacagcaggcccagcgtggtggctcatgcctgtaatcctagcactttgggaggccgaggtgggcagatcacaaggtcaagagatgaagaccatcctggccaacatggcgaaaccctatctctactaaaaatacaaaaattagctgggcatggtggcgcgcacctgtagtcccagctagtcaggaggctgaggcgggagaatcgcttgaaccagggaggcagaggttgcagtgagctgagatcgcaccactgcactccagcctggcgacagtgtgactctgtctcaaaataaataaataaataaataaataagtaagtaataaaataaaatgccaacagcaaaagtaacttttaggctattatgcaccaacaaatttatgtgatatcgagaagtgttaaacagttttagttgcattacactttgcataatatacacaaaacactaaacatgttaataaatgtttgatataataagatgacctaagtttaagtgtaattttgactccttttactgtacctgtgttttcccccactaactgactagtcaagtgctgactggtttttaagagatggggtcttgctctgttgcccaggctggcctcaaactcctgggctcaagtgattttcccacctcagcctcccaagtaggtggaactacaggtgtgcatcaccatacccggcttaacgtctgtttttatatttgtagccacatggtacaaagtacagaacaggtgttcttaacctttttctgccatggacccttttggccttctggacccctcctcagaagaatgttttgaaatgtgtaaaatgcacagaaattaacaacatatttcaagagttcgttctcaaataatatgtgcttcttcagtaaatcattaaataaccagatctagagatgggtctaataattaccttaagtttgaagcagtgatggacatatatatttcaaaatatctgtaacaactataatatgatatgaaagtatctttgatctctactggtgacagtcactgctattctaatactaccatgatctgttgcttacaattgtcattgaagaaaatgtggatttttttttttttttttgagacagagtctcgctctgtcgcccaggctggagtgcaatggtgtgatcttggctcactgcaacctctaccttccgggttcaagtgattctcctgcctcagcctccggagtagctgggattacaggcgcccaccaccatgcccggctgatttttgtatttttagtagagacaggatttcaccatgttggtcaggctggtctcaaactcctgacctcaggtgatctgcctgcctcagcctctcaaagtgctgggattacaggcatgagccaccacacccggctggattttttttttttttaaaagacagggtcttgctatgttgcccaggctggtctcaaactcctgggctcaagtgatctgccctccacgggcttccaaagcactgggattacaggcacgagccaccatgcccagctaaaaatctgggttttcagagacattagtgaaaataaagagtgaatgtttttcccatccaaggtcacagacccggctgaattctcaaccaaagttggaggccttggtctagaaagatacataccaaatattaacagcagttttttttttttttggatagtggaatcgccagagtgattctattttgttttatgatatttttgtagagatagggtctcaatatgttgctcaggctggtcttgaactcctgggctcaaaagatcctcccaccttggcctcccaaagtgctgggattacaggcgtgagccatggcatgcctggcctaattttttatctttgtacctatacgcattttcaaagttttgtacaatgatgttttacaattaaaatttataagagcttaataaatactatgtatttgtttgtcttaaacaacctggaaggatgactaggaaattttatacaactgactacagatgttcaaccttctataactacttaagtgttatgatgactctaatcattcccatgttcttacaagccaagaaaaaaactcactagaattatttattctggagttaaaaagaacaaaaaaacaaactgtcacaactgcagacatttgtctatttttttgccaagtgtaattccaaaaacagctgaaaatattagaacaaattagtacttaatatggactaataccttctgctgtttacaaaaacacaaaacccggaagtacacagaaacttgtattttaaaaataagttattgtgtgtagaaagacttaaaatacaacttatctaagtaatgccaaaacttacataccaccagacaaagtgctttaatgctttatttttatttttttgagacagagtctcgctctgtcacctaggctagagtgcagtggctcgatctctgctcactgcaacctccacctcctgggttcaagcaattctcctgcctcagcctcccgagtagctgggattacaggcgcccgccaccatgcccggctaatttttgtatttttagtggagatggggtttcactatattggctaggctggtcttgaactcctgacctcaagtgatctacccgcctcggccttctaaagtgctaggaatataggcgtgagccaccacacccggccgaaaatgctttaatgttttaaaaaatgagtcatacatagaaagtaagcacatgcttgaaagtgctcatgttcaagttttagcagcaatgtggaatgttgcaaaagagacagggacacagggaaatgtgcatatctcagaagcctactttgctttctttcaaatctaaaaataaaacctttggactgccctattaataagtctagaaaatggatgcttttttttgtggaaagctttcgcaaacatggaaataaaaatatcttcttctcggttaacaggactaaaggatgtaaacataaaccagatgccaatccttgtttctctacaatccccttctccctcatggctctggacaggcttctattgtaaaactatttctatggcacaaggagacatatcaaatgaatgaacattggtctgcacggagcaatacagaccaggttcaaaagtcaaatgttgagtgaaaagagtaagttgtaggatgttccacatagtaggatatcatccagtaaatttgcaaaacactttattccatgttgtcatgtgtaatacaacaaaaaccttgcatggggagtatctcggtgacctttagggagcaggctaccttggggaagcagggcagacaaagagtgcaaccacagggctgggaattcagctgaatctgtcctatttgagttccatagtaagagggctgacaggaatacgaccaactgataacatttcctaagtctgggtgaaaagtacccaaacagctactacttgagctgagcgtagaagccaggaaggaagagggcgggggaagacaggaccttagaatgacgccaggaagaatggtggaagagctgacagcatggaggaagagctgggaacagcgcttagggcccacctcctgagcccaggcttggggagttacagcagtgctgtccacaggggctcatcagagtggacctggtacttgacaagacaggagtcagcttgctcacacactgcttcctttaccatcaaagtcttatgtaaaaataaaaaataaaaaatcagtagaactaagcagcgtactttgtaccacagctgactcccattccatgtaagctcctgaccttctcacagcccagcactttcgtgcattagacaatgaactgtgctggagaagatgatgcctgttcccatgagtctcccaggtctcctgggacagaagtgaagggaaagaagggtccatgaagagacctggagtggagtgggagccccaggggcccagtggatagggtggggtggaaaaggacagcatagatgggcagagcacctcacgctgccttctggggcccagggaacatctaagagtgtgacggggcctggaaagaaagccgagcctggccgggcgtgggggctctcacctgtaatcccagcactctgggaggccgagacgggtggatcacctaaggtcaggagtttgaggccaacatggtgaaactccgtctctactaaaaatacaaaaattaaccgggcatggtggcgggtgcctgtaatcctagctgcttgggaggctaaggcagaagaattgcttgaaccctggaagtgggggttgcagtgagccgagatcatgccattgcactccagcctgggtgacagagaaagacgtctcaaaaaaaaaaaaaaaaaaaaaagaaagaaaaaagaaaaaaagaaaaatgctcctctccacatgtcctggctggttgttcatgcctcgtcttcacacagtggactctctgaatgggcctgagagattctctcctgtcagagcctctacacatgctggtccttccaaaagactcatgcatctctccccactgatgctttgtccttgacctagctaatgtttccttgctgttcaggtcttagatgccatttttcaaagaagtctcctccctgacctacctcccaattcttggtaggatctcctctgatttttatgtgctcccttagtggctggaacttctctccatcacagaagttagcctcttgtaaagtcatagcccatttgcctgtctgtacctcccattagaccagaagactgctgagggtaggatagtttccagcagctagcacagtaactgacacataataaatgctcaattagtacagcttaaaaaagtactgctatataaagagttcaacagtcacagaacaacaaagcaaccacagcctgttcctgaatacttctaggacacctcttatgcatattacagcatgaggaggcagaaggtccagcagcagagggagattctccaaccccgagtaccaaggaactaccacaacctagaatggtcccaaaataaaaatgctccactttcttcaaggttcacaaacaagaactggcaagttccccttgtcgagtaaaaaggtccttccctcacatgccctactcagatgaggtcacttttgatgaaatggaagtttccaaagttttgctttctagtgctaactgctaaaaacttcttcctagcctaacagctctgtgatctctacaaacagtattgcagtgataaattcgtatgcttatctacttacacgcaactttttctctaatggtctgcaaataaaaggctactcttgtcgggctccatggctcatggttgtaatctcggcactttgggaggccaaggcaggaggattactcaagcccaaggagttcaagaccagcctgggcaacacagtgaaaccccgtgtctaccaaaaataaaaataaaaataaaaataaaaaatttagccaggcatggcggcacatccctgtagtcccagctacaagagagcctgaggtgggaggatcacatcagccccggagttcaaggctgcagtaagctatgatcatgctgttgcactccagtctgggtgatggagtgggatcctgtctctaaaaaaacattaaaaaaaataagtaaaaaatttaaaaactggttaaataaattgtggtacatccataacagactatttaaacccaacccttaaaaggaatgatacggctctgtatgaaccgattctaaataatctacaggatacattaaaataaacaaatgtgcacaatattttatagtatgtgtaaaaacacaacgcccacatacccttgtgtatttatacacacatgtaaaatatatacacaaacctaaacacacaaaaatatgtccaatagagacaaagagtagaatagtagttgccagagggtggggtgggggaaaggggagaagtgggagttagtgtttaataggtatgaaatttcagttttgcaagacgaaaggttgtagagatggatggtagtaatggctgtacaacaatgtgaatgtactcagtgccactgaactgtacagttaagatgattaaaactgtaaattgttatatatatcgatatatattttttgagacggagtctcggtctgtcgcccaggctggagtgcagtgacgcgatctcggctcactgcaagctccgcctcctgggttcacgccattctcctgcctcaggctctcagagtagctgggactacaggcgcccgccaccatgcccggctaattttttgtatttttagtaaagacgaggtttcaccgtgctcgccaggatggtctcgatctcctgacctcgtgatcagcctgcctcggcctcccaaagtgctgggattacaggcgtgagccaccacgcccagcctgttatatatattttataataaaaatttaacacacgggtacacacacgcttttttttttgagatggagtctcattctgttgccaggctggagtgcagcggcgtgatctcagttcactgcaacctctgcctcccaggttcaagcgattctcctgcctcagcctcccgagtagctgggactacaggtgcccgccaccatgcccggctaattttttgtatttttagtagagatggggttttaccatgttggccaagatggtctcgatctcttgacctcatgatccacccacctccacctcccaaagtgctaggattacaggcgtgagccaccgtgcccggccacaatttttttttttttttaaagaaacaggtaatagtggctgcctccagggaaagaaatgaatgtttggggcagggtagcagagatactttacaatataactcttttttttttttttttgagacggagttccgctcttgtcgtccaggctggagtgcaacggcatgatcttggctcactgcaacctctgcctcccaggttcaggcgattctcctgcctcagcttcccaagtagctgggactacaggcacgcaccaccacgcttggctaatttttgtatttttagtggagacggagtttcaccatgttggccaggctagtctcgaattcctgacctcaagtgatcaagctgcctcagcctcccaaactgctgggattacaggcatgagccaccatgcccagccccatataacttttttctattattatttttctgagatggagtctcactctgtcgcccaggctggagtgcaatggcacgatcttggctcactgcaacctctgcctcctgggttcaaacgattcttctgcctcagcctcccgagtagctggattacaggtgcataccaccaagcccagctaatttttgtatttttagtagaaatgatgtttcgtcatgttggctaggctggtctcgaactcctgacctcaggtgatccacccacctcggcctcccaaagtactgggattgcaggcgtgagtcactgtgcccagccccgtataactttttacaccacctttttaattccgtattgtccatctaactattcaaaaaatcatttaaaaaaccccggccttatacaagaagtcttttccttaatcgtgtcatttattctatccctcttcctttaagtaaaaaatattttcaatcaaaatcagaattcgacttcagctttgagggtatttattagattcaaataatgcaatttataaaaattacacttgctaccctaaaaatatattcactaaaagccttttctttttttcttttttctttttttttttttttaaagagacagtgtcttactctaaagaacgaggctgcccaggctagagtacaggagtacagtggtgtgatgatggctcactgtagcctaaaactcctgggctcatgggatcctctcacctcatcctcccgagtagctgggactacaggcatgagccaccatgcctggcccctctatttttatcaggtgttacagaaaagcttcaaaatcatcatggaagaaaattatcatttttaccagtacaaaacttttattgcatcccaaccaagctaagatgaatacagaattgtttcaacagaagttaccattatcataattcaagacaaaaatcagccggcaattacatgagttggaaaacaaactactcttatgtcacagtctaccctaaagctccaacttatgtcagaatttaaaatacacacacatatacacaaccctgtggattcctcctcatttatgtaaaacctacttttgtgatgatctgctattttcttgagtcttctggaatgaacactgtagccccactcccggataaggagaagataccacttccagggcttagcactgcccctggcttgaagcagatactcaaatatttgttgggtgaatgaatgattgtctgctgatagggctgcccatcaagcctcataaagaaaaaattcagaaaaaagcaactttatagagaaaataggaaaaagtttaagagatattttgctcacttgaagaaatcagcatttgttaaaggtgaagactggattgactggttcatcaagtggcttagacacaactgactaagtgggctataccttatcccaccccaaagttaaatacaaaacaggtatttttttttttaatcacaggaaaaacacagggcaacttaactataaaattattatttttattttttatttttgagacagagcctcactctatcgcccaggcaggagtgcagtggcgtgatcttggctcaccgaaacttctgcctcctgggttcaagcgattctcctgcctcagtcaccccagtagttgagattacaggtgcccgccaccacgcctggctaatttttgtatttttagtagagacgggatttcaccatcttggccaggctggtcttgaactcttgacctcaggtgatccacccgcctcagcctcccaaagtgctgggattacaggcatgagccaccgcatctggcccttttgtatgtattaaatacgtatgtatgaatataatacatcatcaggttttttaggaagaaaatatagatgactattgatctgttgttaagagtaggaaaggatttcctggcggggcgcggtggctcacgcctgtaatcccagcactttgggaggcagagacgggcggatcacaaggtcaggagatcgagaccagcctggctaacatggtgaaaccctgtctctactaaaaatacaaaaaaattagccaggcgtggtggcgggcgcctgtagtcccagctactcgggaggctgaggcaggagaatggaatgaacccgggagatggagcttgcagtgagccaagatcacgccattgcactccaacctgggcgacagagcgagactccgtctcaaaaaaaaaaaaaaaaaaaaaaaaaaagagtaaaaaaggatttcctaagtatgaaagcaaaagaataaatcataacataaattttatatatcagaaagacaagaatcaagacgtaagacaaaacaggaaaatatctgcatgacaaagagttaacatctttaatacattaagagctatgacaatgattattgaggtttagcctcagtaataatccaagcggcaccaatttaaaagatgtatatccaattctgggacgatatgggaaaatggcactttctcagactgttgtgggaactgggatagccattttggacagtgatgtggtggtatccaccagaaattccaagtctaggcagccattcttcaaaatgactggcacatgaggaatttcaatcctgtagcatttttaataacatagagagacaacgaaatgcatgacggtaagtcagccctggactacactgctatttaaaagaaatgaggcagagatgaatatatgagatggaaaaatgcagaatatgtatatataacaccatcctgaggccaggcacggtggctcacgcctgtaatcccagcactttgggaggccaaggcaggtggatcgcctgaggtcaggagttcgacaccagcctggccaacatggtgaaacccatctctactaaaaatacaaaaattagctgggtgtggtggcaggcgcctgtaatcccagctactcaggaggctgaggcaggagaatcacttgaacccaggaggtggaggttgcagtgagccaagattgtgccactgtactccagcctggatgacagagcaagactccatctcaaaaaaagaaaaaacaaaacaaaacaaaaaccctcctgttaattacaacacaaaaagtacacagtttagtcttagaagacttagaaggatctacattaagctattaacagcagttattctgggtagtgggagcagagattaagcggggagctttcatttttttacctgatacttttttttttttttttttttgagaccgagtctcactctgtcacccaggcaggagtgcagtggtgtgatcttggctcactgcaacctccgcctcccaggttcaagtgattctcctgcctcagccttccgagtagctgggactacacgctcaagccaccatggccagctaatttttgtatttttaatagagatggggtttcgccgtgttagccaggctggtctcgaactcctgacttcaggtgatccacccgcctaggcctcccaaagcgctgtgattacaggcatgagccaccttgcccagccacctgatcaatttttaagtggtttgatttttctataaatccatgtattattttagtaattctttaaaaagtaaaagaagaaaaatagatatcaagcatttatctactaaagacgggtactgtcctttgagaattccctcaaaagttctttgaagctcaaatggctacatctttcccattcataagatactttttaaatttcctctttctacatttctttttaaaagtttattttcaattagcttcctcaggttgaactctctgtacatttcttaggagaaactgtatggtgtcaacactgcctgttttataacatccattcgtaatctgtaatctgagaaaaagactcgtaaaaacccaaaccaccctccaggcctaacatcttccagaagaaacccattcactgcccatattacatttagtccacacaatttctgagacaaagcacaaagcactagccatacaactcccaccagcataaatacgtggagtacaaagaatgtcctgtcagctgggcccagagcacaccccacagcagtaaaagagaatgacaatttgagtcacaggatcaggagcagaatcaaatttgggacttgaggcagtgtgatgctcttctggtcttccgcttccttccacaccttctattctccttcagccaaaccttgccctcacataatccctaagcaggctatttcttatggatgtctacaacagcttcacactgaggtgtcagaaaccactagagagacaacaaagaacgacttagggtctcagtcggaatcacaatggccgcataagtgaaaactcacatttttgcttaggggaaaaaaaatgggaaaattcaattggaacattctgctttaccacacagaagttctgaaatccacatgtcaaaacatcaaatgcggagtgaccactaatcaaaaagacaaaacaaaacaacaacaacaacaacaacaacaaacagcttgagatgttgagcctgaaggttgagaaattaaggaaccattcatttttacaaaactaaagtccacacaatggtgccaagtagttcaaactgcagctgatacagcacctgagtgtcagacctagaatgactggggcccccaggtttttacaaagtactcatcctcctctagagtcccaagaaccagatgtatatctgggtactctctttagttaccatgggaggagtgtagcaagcacatgacattagccatggcccccggtgttctgagacagctttcaggagggtgtccttctagggaaccaaccacataccagttcccatatctgaaaatgcattaccactgctcactaatgttgaccactaagccatttaccccaaaccaaagcaaacacatgctgaagaccgctaaggcaacagcagcagcgcaaaagggctcagtgcaagcgctctcagctcagctgacctgcttcaaggtgaactgaagttgcagatcaccagttccggctctaatctgacgcccgcccccagatcacgctgtggcgaccaagtaaccctacacacactgacctttcagggctcagggaagtgacttttttttattatatggcacagtttggcacagttatgtctttagtctttggggtacttttatactgtccaagagtagtatatttttttcctcttttccttttttttttttttttaaaaaaaaaaaaaacagatggccaaaccaggacatatactaaaaaaaaaaaaaggaaggttacttacctgagccctaacatcccagctaccatggaatcctgttggagctggtctacagaagcaaggtgtattctggggagtcacatgtcacatcaaagcaggaactggtgagtctgtatttttatggagcctaaaacaaagaaaattgtaagttgaaagcccccattgagctgcacgacctttttcccagggctatttgggacattttgaagataaacacatagacaaagtactaggctatttcccagcttacctagctagaaacaaaggataagctgcaaattactggcacgtaacacacagtgctaaaataaaggaaagattcatgcttgttagaatcaacactatcacaagccttgtcacctctaggggacacttcgacactacaaaagcataccatgagtggcgatttctggcaagtatttcttctaccacggcacacagaaattctcagggaagaatacatgttcaagagaatacgcaacatcaaaataccatccctgaaagaacacatggaacctagaggcagtctcccttctttttcaagcagctgaatgaagttgcaataagctgctgtaacaacatcacataaaggggctttaatcctgagagaaaaaatcagcaccaagggaaaccaagtgctctgggagacccaaagccatcatccaaaacatgcaagtctatttcagggcaatcagttttaagcctctcagatcagtcaatctcgatgttcaacaaactcagttattagtttgatagtttctctttttcttttgaacacatgttcaaaaaaggacttttgtcagtaccttttttgtcattaagataaccatcatttcctagttaaagcctaaactgccccatatgaattagctaatttctgatactatgctggcccaagagtagcacttttataagctaaaaacgaaagctcagagcatacaacttagagactattcacacaattactcatgtaatcaaacccagaagaagggcaacaccaaccaagtcttttactggtctgttgctgctctacagctaccaggatggtacctaaaattatcttttgaggttcagtgaggcctcataattcccttaaacagtcaagtcatagaatactttgaaatcccagaagtcaagttaatagtattactcggctagctatataataaaaaccaaactggtatcctggctaggaggccctggaaaagtcacaacttctcagggacacaagttttttttgtttgtaaactgatggtgctggactaagaatccttctagttcttaaagtttaagataattaacttaagatttcatgtcaaaaagaaaagagccagaggctgggtgcggtggctcacgcctgtaatccctgcactttgggaggctgaagcgggtggatcacgaggtcaggagttcaagaccagcgtggccaagatggtgaaaccccgtctcgactaaaaaaaaaaaaaaaaaaaaaaaaaaaatacaaaaattagccaggcgtggtggcaggtgcctgtaatcccagctacttgggaggctgaggcagagaactgcttgagcccgggaggcagaggttgcagtgagctgagatcgtgccactgcactccagcatgggtgacagagtgagactgtctcaaaaaaaaaaaaaaaaaaagaaagaaagaaaagagaaaatgagagcagtttatgaaatctaaaaaagaaagttaatatatatataaaacacccctagctcttgggctaggaagacaagtgcatccttactaaggcttggtcctgtcaacttcagaggcaataatgagagcccagactacagtgtctacagtaactgcaaaacagccacacagcacagcgggaacacattcacacgccaggagacccagcatacatgtgcttgaagaagttataagactcaggctttattctctaacgaaatggtcattccccctttgatgtgggggtgggggtggggatgccctgcccaccccccaattccggctcccactcagttatcccacataccatacataccatcaaagtatttaagcaatggcatgcaaagcaagctttcgacaggtttcttgcaagagaaaggcagaagagaacaggtaaaagcagaagagcacacaggtaaaagcagaagagcacaacttctacttaagcccaaagaagagggacctgttcacatcttgtcctacccggaatgatgcacacgcacaggggcttgccgggacagcagtagtttcactggaaagggctggtatggaggcaccgaggacaaggtccttccatcgcagcggtgataatgctctacccaagaaaaaaagattgcgtctgccagccacgcaagactggtctgcaaggatgtcaccatagcagagggcagggaaaacaagcaggtgtcctgccacactctttgggactggccagtctaggagtgtgctttaccccacgcactgaaaacactggttactagaaatatcaaacatttcctgtgattctctcctccaagataactcgggcagcttgagaacaagctgctcttagctaattaaaagatttctgctgatattaacctttataaaagatttcaggttccaggacacgtcatttatcatgcagagtcccaagcaggtacattagcaatggaaaccaggctccaataaggaactaacaattttatctctgttgttctttattttaggttaaagaaatgaacttctcgtttcatctccacatgggaggaatgttctggagggggtaacagcctattaaactcatctagctttttttttttttttcaaactccacagcttgcctccctaccctactagactagattgcacagaggcagggcaggcacgggaaacgactctggttggaaattacaaacatatacacacagaatgcaagcaccataaccctttgaatacacagtggtttgtgccttgccccagacctacctaaggatttaaacagcacagaagtcggagttcggctgactgcatgacactctcctatcaatcgggtgaaacaaagacccagtactctaagcttaaagcattccaggcaaaattttagttaacaggcaataggaaggtgtgataggccagtgctaacaagaaagccacagatgggtttctttgagctgttaagacactggaaagggctggtatggaagcccagtggagccattaggacaatggaaaaggaggtacccctccaccaggcactttgcagagaaaactatactctggaagctgcctgcactgttgatagggctagacgtatgataaacagctaaccggaggggcacccgaggagacaaactgccaactatgaagaacaaagcagagacctcaacttgtcacgtctcaagctcagatgtacaaactttgggatcgtcaagtgaggctcgtgtgtatgcctggggatatgactgtattccagtgatcagccacctagctgacctgccacgaatgggtgacctgtggtgacttactttaatcaactgtagtacttctagattgattgggtgatttaaggttctgacatattcaggcaagaaaataaaagcaagtgtttcctagacttcctcattgggatttgaaatagaaatcctgaaaagcccataaaagcctatttccctaaatccttggtggaaattcccaaaagattaaaaaatccagaccctgtcttattatagggacccagcagatttcaaaagactcaagaggtcagcttaatctggttattaactgaaattgctgagatactgatgaacattccagccatggaacccaaaattctctagagtaataattacctattagtgcaatgttactactgaggccgtatatgcttcatttttacagtataacaaaatgtctaaaacttatgagagtcctacaacgtctaggccactcagtatcacatccaagtaggtatggttcctggatcaccaaccaacccctgaattcgatcctgttatctcacagtctggggtactgatcccgcacagcagagacacaacgtgtgaaaggctcggcagagcccattcctgttcctggaaaaataaccagaagcacacatctgcctgaccatgagtcaggaatatcaattttgtggtggagcccatttctgctgtgaccaacccacacccgaacacactcgcaacagaagcaaccgccacagagcaattccagaatgagctttttccccctcggggtccatacttagcaatgtcataaacggtctcccctgcgacagcaatccttttacactcttcataatgaccttaagtctttagtgcaaaaccacagaaacattgccactgccatataaaagtcatctgagtttcagtttgggtgattcggtcatgaccaaactgaacagaggataacctttcaggcacaattaacaggagccacagcgtcgcgatgaacttgccccatctggtaccggtgatcccgagcgctccagggcgatgagagcccgttacctactatgtcccactccacttatgtaactggaagatcgccggcgaaggggagggtaggatgggagggtgctcacattccgaggccacagcactccaaagaacctctgagcaccctggggacacgctcgcaccttagagcctctggcgccgaagagcctcgggtgctgctggacgcacagtcccctacccacggctcctgatgggaactataaccacctctttatgatgagttgtgggacccagaacacaatgtctagtcccttttgtggataataatccccacctacttgttcctgctagatggggaaaggagccggtggacctactcgctcgcgggggggtagcggggggcagaaattcatggaatgggcgagaaggagggggaggcaaagcccagagatgggggtgagagctcaggagcccttgtggcgcactctcccgacgggaggcgaagtgcgcacgcgcgccggtgggggggccgagtaacgggagagggggcgcgcgagggagggagggggagagcgcgatccagggagaggccggggccgcgggcgcgcgacggcgccgcggcccaaagccccgagaagggcaggagcgcgcgcagccccgacaggcgaaccccggcgacaggggcgcccgcggggccgggggccgggatgcgcgtcgagggcgggaggaagaggggcgtcaggcgaaggcggctccagggaggccgcgccgaggacggtcacccgcgagcacgggtgacgggccgaggggagagtcgccaccggcggcggcgggagggggagggtagagaggagggacgccatccgccagccgtgtcgtccgaccccgcgggcccctcccgcgccacgtcccgcccctgacccccgccccccggcaagggtccccgcccgcggccacggcggtcccactcacagtctctcctcctcgcctcctcctcctcctccgctcggcgcggcggcggcggcggcggccattttccggacggcttttaccacagccctctctccgagaggagggagcgcgcgcgccgccgacgccgggaccccgcacggccgacgtcgcgccccgccctcttggccggcccgcgcgctgctgcacctgcgcgcccgcgccccgccctcggcgccgctgcgagcccgcccgtcattggctgtgatggccgggctgggacggggaggacgggggaggggggaggtctcagcggcgatgccgtcaattggcgagatttcctgtccatttcggccagggaaaagggggcggacccctccagctgttgattggctgctttcggccgtcgtttggggaaaagaggcggcttgggcgcggagggactggtttagtgggcggaatttgaatgttaaggattaatggacccttgcggatgctggggcaagtgaaggcctaggcttgggacgcctgtttgcgctgctctgaggggcgattgaccctctgtccacagatgcaccgagtgcgctgcaataagcgtttcattgcacccacattttctcaatatcactatcttcggcagaagcagcaaagttgcccaccctggagcctgacgttgccccagctgaggggccttggtttcagaggcctactcaatgcattatttcatccgagcctgcccagtgctcacactctcatagaggcggggaataaactgacaacaaatcgcaaccctggctttcgcagaactctggcgggggaagagagtgcatgccaaggcctcgtgacacctgtcactgttggatcagatggtttggtggaggtgtgaataaggggcaatgttagctctgcctggaagatatgatttgggagctgagatccagcaatttttcactttcctagaagagttgatttggagctgagatccagcaattgtgttttgggaaaataagagtatgagaaaactgttagctaaccaggtgttcaggacaggagtgtttgttaaggggaccttaccctgatgccagtcattatccaatccattcaatgatccttctgttagttctatgcttagcaagaaaacctgattctgatttggctgcttgcccccattcatttattgactacctgctatgtgccaggcactcttccaggctctggatgcacggtactgaacagacagcaaactaacattcttgccgggaagattcatactagcatacaaataagtataatatatcatttcacatagtgataagggctttgagaaagataaactaagtgaagggggtgctatttagatatctgctggttttcaccctcattttactccctcatatgaatatctggggaaagaacattccaggcaagttcaaaggacatgaggagagactatgcctggcatgttggggactaacgaggaagtcagtgttgctggagagtggtagggaatgtgattggaaaggcagctggggccactatgagaactgggagttcattcttttttggggggggtggggatggggtctcattctgtcacccaggctgcagtgcagtggcgcaatcttggctcactgcaacgtccaccctgagctcaagcgatcctccctcctcagcgtcctaagtagctgggaccacagatgcgaaccaccacgcctggctaagtttttgtatttttgatagagatgggagttcaccatgttgcccaggctggtctcaaactcctgagttcaagtgatccgcccgcctcggactcccaaagtgctgggactacaggcgtaagccaccgcacccggccagaaccgagagtttattctaagatgagaagccctcagaggattttgagccaggagctgtctgatctatgttgcaggtgtagagtggagaactggacgtgatgaaacaaaactacagcacaaggctagttgcaaggccctggaacagtctaggagaaagagttgatggtagctttaactagggtggcagcagtgcagctctgagaagttgtgagattcaagatatgttttcagaactgaacaaaaggattggatgtagggcatagagcaagggaagaaacaaggatgattcctgagattggggcctgagcaactggggaaataagggtgcttttcaccatagtggggagaactacaggaaaagtacattttcagaggtgcagatcaagagttctgctttggctgtattaagcttggggtgcccagtggtgtgaaagtggagatgttgagtaagccattgggtgtgcgatgctgaagtatagagatgcggctaaagcagtccaaaagtcatcacgctgaacatccaattcaagaagccataaagaaatgacagagtaagcctgcaaaagtagaagaaagaaaaataaggatgaataaaacttaatgaaatagaaacaaatgatggagaggattgagaaaattttaaacctgcttctttgaaaagctgaaaaacaaaagccaaccctctaacaagctggatataaagagaaaagagaaaagtaaattatgttactcatgaaaaggttttattatgcactgtgtgtcagtaaatttgaaaacataagcaaaaggaatacattcctaggaaagtacagcttaccaaaaccgactttagaaacagaaaatccctgtaaccacaatgaaattgactatgtatttaaaaagctacccatcctcctacacacagacacagacacgcagacacacacagacacacacgcacacagagagagagagagagagagagagagagaaacagaccaagagggctttatggatgacttctaccaaatctttaatgagtaggcaattccaatcatacacagaaaagaaataaatgtctccaaacttattttactagactaatatatctactatgatgagccaagaaaagtatgacacaagatgtggaaataagttttaaaattctagacaaataaactgaatcctgcagtatatgatctatcacaaccgagttgagttttatcctaagaatgcaaatatggtttaaaattagaaacccaaccttaacaaacttaaggggaaaaacactacataattatttcaatagatgcagaaaaagcatttgataaaattcaacatctacttatgattttttttaaaaatcagagaactggagttcaagacaagcctgggcaacatagcaagaagcaagaccccgtctttacaaaaaaaatttaaaaattagacagacgtggtggcacacacctgtagtcccagctccctggaaagctgaggtggaaggatcacttgagcccaggagtttgaggctgcagtgagctatgattgcacattgcactctagcctgggcaacaaagcaagaccctgtctttaaaaaaaaaaaaaaaaaaaaaaaggtgaccaggcacgacggctcacgcctgtaatctcagcactttgggaggccgaggcaggcggatcacgagatcaggggattgagatgatcctggctaaaatggtgaaaccccatctctactaaaaatacaaaaaaaaattagccgggcgtggtggcacgcacctgtagtcccagctactctggaggctgaggcaggagaatcgcttgaacctgggaggtggaggttgcagtaagccgagatcgtgccattgcactacagcctgggtgacagagcgagactccatctcgaaatagatggatggatggatggatggatggatggatagacagatagatagatagatagacagacagacagacagacagatagatagatagataaaataaaaggttaggagagggcaaaaaacctgaatagacatttctcaaaagaaaacatttaaatgaccaacaggtatatgggaaaaatctcgccaggcaccttggctcacacctgtaatcccagcactttggtaggccgaggtgggaagatcacttgagtccaggagttcaaggccagcctggttaacatggcaagaccactgtctctaaaaaaacaaaaaattagccaggcatggttgtgcacacttgtcatctcagcttcttgggaggctggggtgggaggatcacttgagcccaggagtttgaggctgcaatgagccaggatcgtgccattgcactttggcctgggtgacagagtgagaccctgtctcgaaaaaagaaagagaaggaagggagggagggagggaggggaaaaaaagttcaacatcactcatcatcagggaaattcaaatcaaaagcccaatgagataccccttcaattcagttagaatggctttaatcaaaaagacaaaagaagacaagttggcaaagatgtggagaaaagggaatactttcatactgttggtggggtagtaagttagtatagtcaactatggagaacagtatggaggtttctcaataaattgaaaatagaactaccagcaatcctactaccggtatatatccaaaggaaatgaaatcagtatgtggaagagttatctgcactcccatttttattgaatgactattcacaatagccagatacagaatcaacttaggtgtccaccaacaggtgaatggataaagaaaatgtggtacatatatgcaatggaataatattcggccataaaaaagaatgaaatcctgtcacttaagacaacatgaatgaacctggaggacataaagttaagggaaataaaccagaaacagaaagacaaataccacatgatctcagtcatatgtggaatctcaaaaacaaaaaagagttgatatcatagaagcagagagtagaacagtagttaccagagactggggagaggatcggggagaggaggatgggcagaggttggtcaacaggtacaaagttattattagataagatgaataaattctggtgttttgaccaggtgcagtggctcacgcttgtaatcccagcactttgggagactgaggtgggtgactcacttgaggtcaggagcttgagtgcagcctggccaacatggtgaaaccccatttctactaaaaatacaaaaattagctgggcatggcggcgggtgcctatagtcccagctgcttgggaggctgaggcaggagaatcgctcgaacccaggaggcagagcaacctggtgagctgagatcacaccactgcactccagcctgggtgacacagcgagattctgtctcaaaaaaaaaaattatgttgttctattgcacagcagggtgactatggttgacagcaatatattgtatgttacaaaatacctagaagagagacttttgaaagttcccacaacaaagaaatggtacatgcatgagctgatggatatattaactaccctgcttggaccattgtgcaacataaatatatattgaaatatcaaattgtactccctaaatatgtgtcaattaaaaaacaaaaataaaaagccccacatacatccttcttccattctcttttaaacctcattcttggtgcgtctctgcggggagaaaggcccatttcaagtcagttccccggtgttaggatgcaggcatgtaaacacgaccagtaataaaaagctggaaaatgtaatgagggaaaaaagattcaactcactctcactacaaaaattataaaacagctgggaataaacttaataagaaatgtcaaaacctgcatcaaaaagctataaaactttactgaaaaatctaaaagaagacctgaagaaaacaaaaacaaaaacagacgctaccgtattcctggaggggaagcattaacattatagaaatgttaattcttcatcaataactctggaaattctttgctcaatcaaaagtcaagaagtttcatgggctataacaacttaaatctagattggaaagaataatgtacaagactagaactcaagaagtttttgaaatattaaaaaataatgaagagaatcttgctaaattccttaggttgaatagaaggaacttaagttatacagtttcacacttgccattgaaaagtagaaaaatatactataatcggctgggcatggtggctcacgtctgtaatcccagcactttgagaggccgaggcgggcagatcacgaggtcaggagatcgagaccattctggctaacaaggtgaaaccccgtctctactaaaaatacaaaaaattagccgggtgtggtggtgggcgcctgtagtcccagctacttgggaggatgaggcaggagaatggggtgaacccaggaggcggagcttgcagtgagccgagatcgtgccactgcactccagcccgggtaacagagcaagactccatctcaaaaaaaagaaaaaaaagaaaaatatactataatcaaaattatttactattagaattaaaaatcagtaatttaaaaaatgggactgtaatagtttaaggtcctcttaaaaacaggactgtagaagataaaaaccaggaaaatctagtatagatggtaattgacagaaagcccacaaccagaaggattttatcaatatgacaaacaacacaaacttttactccatttgtctaaaaatctcttaaactgatagagaatatatatatttcagaagagctaatccaggccaggggcgctggctcatgcctgtaatcccagcactttgggaggccaaggcaggaggatcgcttgagcccaggagttcgagatcagcctgggcaacaaagtgagaccccgtttttcccaaaaatgaaataaattagctgggcacgtgcgcacctgtagtcctagctactcaacaggctgaggtgggatcatgccactgcactccagcctgggagaaagagcaagcccctgtctctaaaaacaaaagaaatgaccaacattgagagccctacatattaaaacctaggagataaggctacagaggtcacctagaaaaattaatagccttaaccatatttgttagaaaatagataagaaatgaataaattctgatataagacaccatgagcaggcacagatgtgcatgaacacacacacacccagacacacagacacacacacacagtcacatacacagacacacagacacacatacacacagacacacacacagacacacagacacagacacacacacacacacacagttttccttctttactcatagaagtgcactaaaagaagaatgtcaagaaacagaaaggaggcagggtgtggtggctcatgcctgtaatcccagcactttgggaagccaaggagggtgaattgcttgaggtcaggagttcgagaccagcttggccaacatggtgaaaccctgcctctgctaaaaatacaaacaattagccaggcctggtggcacgcacctgtaatcccagctacttgggaggccgaggcaggagaatcgcttgaacccaggaggcagaggttgcagtgagccgagatcgtgccattgcactccagcctgggtgacagagcaagactccgtctgaaaaaaaaaaaaaaaaggaaaggaataaacccaccagagtgaagagaatgtggtgaggatgagaggttatcatcaaaggacaacaactttatagaaagcatatgggaattgattgatgaataaaataggcagtaaaaatccaggtgagaatatttgacaagggagccacagaagaagtgggagtgagtttgctagatataacaccagacaatcagaatcagtaggcatgtggtagaaaacgatagaattaaataggactgaacacatggggattaattgaaggcaccagtacagaatgactgtaccagttggaacctcctctccccaccagacagctgagctgggagctggcacagacctacagggaaaacacctgacagttctgtaaagaaattgattgaaatgtcggtggagagctaaggcttccagcatggatgctgacaacccctgaacaattgtttcctcattccggcatctaggggatactctgttcgtcacctccctgtcctacacagagaagagtcacagcaggaaaacagacctatttgcccaacagcagattaaatccacaatacttatccagtccttccttattaaatataaaccagtcagtaaatattatcagaaatttgatgaaagccttcaacaggaaaaagagtcaagataaacctgtagaaaaaatataaacttggaattcaagaaaattcagggaatgtatcaaaaaatttaatttaattaacatatctacagaactaaaagaaaatgctgtattcataaaacaagaacagaatattatgtaaaaagagcaatcagagaacaagaaggaattattgaaattcaaatttcaatagaaatattggaaaataaaactgaagaagtctcccagaaaatagaacaaaacaatagagacaaagatatgagagaaaatatgaggactttgaggagtgatctaggaagtctggcaagcaactaacaagaattatggaaaaatgaaataaagaaaaaggaacaggaatcagagtagcaccagagttcataacaacactgaatgataaaagatcacaggacaacaagaaaagaaaaagataatagggcaatgctttccaaattccaagggaaaatgattttccacatagaagtacaccatccaaaatatccattatgtgtgataatggaataaaaatgtttttagatacacaagagctaagaaaatttgcctctgaaatgtactttcttaggaagctacttggggatgctctgcagcaaatcaagggtgcaagccaagaaaaaggaaaatgtgggatccataagacaatggatctaatccaggagagctgtgatgggaaataccagggatgccaactgggcagaaagcctggttggcaatcagtccaggttggagtaggagaatggtaggctctgggagagaggactccaagaattaaatatatatgtatagccgggtgtggtggctcacgcctgtaatcccagcactttgggagactgaggcgggtggatcacctgaagtcaggagctcgagaccagcctggccaacgtggcgaaaccccgtctctactaagaatacaaaaattagccgggcatggtggcgggtgcctgtaatcccagctactcaggaggctgaggcaggagaatcgcttgaacctgggaggcagaggttgcggtgagccgagcttgcgccactgcactccagcctgggcgacagagtgagactccgtctcaaaaaaaaaaaaaaaaaaaattgtgtatatgtgaattcaacatattagatggtgtgattgggagtctgaagttggatacgatgatggcaaatagtacaagaaaataaggaaaagcaattaaaaataccagaaggaaagaactatacaagaaagttatgatccgcaaggagccgtggctcacgcctgtaatcccagtactttgggaggccaaggcgggcggatcacgagttcaggagatcgagaccatcctggctaatgcagtgaaatcccatctctactaaaaaatacaaacatttagccgggcgtggtggcgggtgcctgtagtcccagctactcgggggctgaggcaggagaatggcgtgaacccgggaggcggaggttgcagtgagccgagatagcgccactgcactccagcctgggcgacagagtgagactccatctcaaaaaaaaaaaaaaaaaaaaagaaagttatgatcaaaacaagaagcaggccgggcacagtggctcaagtctgtaatcccagcactttgggggtccgaggtgggcagatcacttgaggccaggagttcaagaccagcctggccaacatggcgaaaccaacatgtccctactaaaaatataaaaattagctgggtgtggtggtgcacacctgtgatcccagctactcaagaggctgaggcacaagaattgcttgaacctgggaggtggaggttgcagtgagccgagattgcaccactgcactccagcctgggtgatagagcgaggctccatttcaaaaaataaaaataaaataaagaaaaaagaaaaaagccagaagtaaagtaaaatagatcataattttcctaattcatggtaagaagagaatcattgggacctgggtgctaggaaagttctcttttcaaatgactcagggactatcgaattagacgtataagaaagaaatataatcctagcattcctcttcttgacctggcactgaaaatatttacatagactttctaatgtgaatttttgtttttgcttttcaggttttagcgtcaacctatacacaaaacatggaaggataggtttttgttgctggatgggacacatttctctcctctttctgtgtagcaagagttaactccagcaggcctgggtgttcctgcaggtggtattggggacccccacacctgatatatgaccatgtatgtaacaccatccactgttatctttagttctttgtatgtttaaataatacatttaaatctcttgttccattagctttcactagtaaagttatctttgaccattttgcatcagctacactttaattttacattgtcggggttacttttttttttttttctttttgagacggagtttcactctgttgcccaggctggagtgcagtggatggtgctatctcggctcactgcaacctatgcctcccgggttcaagtgattctcctgcctcagcctcctgagtagctggggctccagggtgccacacactcttaaacaaccagatctggtgagaattcactcactattgtggggatagcaccaagaggatggtgctaaatcattcatgagaaacccacccccgtgaaccaatcacctcccacttggccccacctccaacagtggggattacaattcaacatgagatttgggtggggacacatatccaaatcatatcagtctccaagtgactatttcatcagtttagagtcgccccaggaaaacagaaaccacttcgacttagggcactaaataccagggaaagggtacccaggactacttggaggttgataggggatcagcacagcccacccgaggttggggggccacagagagaaggcctagaaccacaggggccttttggtaggagctgcagctgccgccgagctgctccccccacttcttcttccctctagtctccggctcgggtctcctatggtcaaacccagccagaaaccagctgagcctggatcctgggacaggcaggcaacaggacctgcccctgcagggtgagggagagggaaggccagatttctttttaaagactttatattttagagcactattaggttcacagcaaaattgagaggaaggtacagagaattcccatattctccctgtttccatagttttatcttttccagaatgtcatagagttgaaatcctacagtctgtagcctcttcagattgccttctttcactttgtaatatgcatttaagcttctttcaatgttttttcatggcttgagagctcatttctttttagcactgaatgatattccatcaactggatataccaccgtttatttatccattcacctactgaaaggcatcttgattactcccaagtttgagcaattatgaataaagctgctataaacatccatgtgcaggtttttgtgtggacataacttatcaactcctttgggtaaataccaaggagtgtgattgctggatcatctggcaagtgtatgtttagttttataagaaaccaccaaactgtcttttagggtggctataccattttgctctcccaccagcaaggaatgagtttccattgctccacatcctcaccagcatttggtgttatcagtgttctggattttggccattctagtaggtgtgtactggcgtctcattgttgctttaatttgcatttccctgataatgtatgatatggagcatcgtctgatatgcttatttgccatctgtctatcttctttggggaggtttctctaaagattttcgacccaattttcttgtttgtttgttttttgtttgtttgtttgatttgagacagagtctcactctgtcgcccagattggagtgcaatggcgcagtctcgtctcactgcaacctctgcctccaaggttcaagcgattcttctgcctcagcctcccgagtaggtgggattataggagcacaccactacgcttg

SEQ ID NO: 1033 - DNA, 82772 bp, Mus musculus
taccgacaagtttaaggatattccccactttctgttctattagattgtgtctggttttacattgatgcctttaattcatttggacttgagttttgtgcagggtaacaaatattggatctattttcattcttctacaggcagacctccagatagacaagcaccatttgttgaagatgctctcttctttctattataaggttttggcttctttgtcaaaaatcaaccacccatagatgcatgggcttatttctggatctttgatgtgattccatttatcatcatgtgtgtttctataccaataccatgcagtttttattactatttctctgtaatacagcttgaagtcagggggtggggatacctccagaaattcttttattgtacgagatcattttagctaccctgggtttttgtttttccatataaagttgagaattgctctttcaagttctgtaaagaattacgttggaattttgatgggaattgcattggatctgtagattgcttttagtaagatggccattttcactatattaatcttactgatacatgagccagggagatctttccatcttctgatattttcttcaatttctttcttcagagacttgaagtccttgtcatacaaatatttcacttgcttggagttataccaaggtattttatgttacttgtggctattgtgaagagtactgtttccctaacttctttctcagcccatttatcgcttgtgtagaggagggctattaattcctttgagttaattttgtatccagccaatttgatgaaaagtcctctggtacaatttttggggtcacatatatatatatactatcatatcatctgcaaatagcaatactttgacttcttcctttctagtttgtatccccttgatctccttttgttgtctcattgctccagctataactttaagtactgtattgaagagatatggggagagtgatcagtgttgtcttatctttcctggatgtgtcatgaaccttttagactttgcattttctttgagtgatatattgatgagattctctcttccatttcctgtattctgttggtgatgcttacatctgtagttcctgttctctttcctaggttttccatcttcaggattgcctcagtttgtgttttctttattgcttctattttatattcaggatttggacagttttattcatgtccttcacctgtttgattgtattttctcatatttctttatatttatttgcttcctcattttttaaagatttatttattttatgtatgtgagtacaccgttgctctcttcagacacaccagaagagggcatcagatcccattacagatggttgtgagccaccatgtggttgatgggaattgaagtcaggacctctagaagagcagtcagtgctcttttttttattattatattttttattacgtattttcctcaattacatttccaatgctatcccaaaagtcccccataccctcccccccccactcccctacccacccattcccactttttggccctggcgttcccctgtactggggcatataaagtttgtgtgtccaatgggcctctctttccagtgatggcttactaggccatcttttttttttaaaagatttatttatttattatatgtaagtacactgtagctgtcttcagacactccagaagagggagtcagatcttgttacagatggttgtgagccaccatgtggttgctgggatttgaactccggaccttcggaagagcagtcaggtgctcttaccaactgaaccatctcaccagcccccatcttttgatacatatgcagctagagtcaagagctccggggtactggttcgttcataatgttgttgcacctacagggttgcagatctctttagctccttggttactttctctagctcctccattggtgggggccctgtgatccatccaatagctgactttgagcatccacttatgtgtttgctaggccccggcctagtctcaccaatcagtgctcttagccactgagccatctttccagcccggctttctctttaaaaaaaaaaaaagatttatttattttatttatatgaatacactgtggctgtcttcaggcacaccagaagagggcattggatcccattatcatgtggtcgctgggaactggactcaggacctctggaagagcagtcagtgctcttaactgctgagtcatctctctagctccttgcttcctcttttaatgcctctatctgtttgaatgtattatcctgtgtttctttaaagaatgtatttatgtcctctttaaaggcctgcatcatctttataaagttggatttgagatcctcttgttgtgctccagtttcattaggatatctagggtttgctgtagaggatagctgagctctggtgatgccatattgccttgagtcttgttgattgtgttcttacactgtcctttaggcatctggttttccctggtactggcaggatgatcctgatagcagcaggacttcatgaggaggtgggggaagccataggctagaaaatgtaggtcaggataccctactctgttggctgtgtctcaggcagacaccactctgcaggctttttcttgagtggttactactctacagggtgtgccccagtcagacccagctagggtgtcaggcagctccaactaggatgggtgttcaggcagggttccaagctggttagttttggggcccccaaaggtttccacaggaaggcaggatgctcttggggtcctgtgtgacttctccagaccaaggagcaagactagatctaaacagtggtgctcaggggacagttctcaggccaagttctactatgcagatgcttgctcatgagcttcatttccacagagagaggtgtatcaaggcaaatgtgtctgatcttgtctgaaagcatggactcaacttgctttcttgtagaacccaagatcactagtgcagagatggcaccacccacaatgggctgggccctccattctctcaccactcactgagagagtacacagttgtccacagctggatcttatgaaggtattttcataattgaagctccttcctctttgatgattctagcttgtcatgttgacataagactaaccagcacacacacacacacacacacacacacacacacacacacacacacacattaaaacagtgctctgtaacagattctgaatgataatgacgtgtcagtgtagattcattgaatatataaaagtctcactctaatgggtgttgataatgaaggaactgtgcatcttgttggggcagaaggtacatgggaattttcattaacctcttctcaattttatcaacattcagctactctaaaaacaaatctaaaaacaaaataaaaacaaagctaaggatgaccttgagtttctaatcttcatgctttcaccactggagagctggaaccacaactccctgtttgtgtggtgctagggaccaaatccagggctttgtgcatggtaggcaaataaagactctaaaactcatccttcacctctctcatatcctgcagggtggcccacactagatagtagatcttgcttagcatagtggcaagggggttcatagaagagccagagactaatattaaggcccaaaaatgaccctcaagaagtttcaaaattagaaaagaaacaatgaacaaaaaggggatctactagaattagatttaaatttcagttgaaaacaatcaaagtttgaaaatatgtagaacactggaactgtgagagcagaggaagtaccaagtcaataaacagagagaggcaagaaaattaataccaaacttggttctttgagtacataaaaagaaaacataaagagaaagtagcagtcaacctaagcaagcaagaaaacaaacaataaccagagaaaaaaatatttaaaccaaagctggaaaatagcagatattgatgaaatatctaatctcacaagacctcaaaaacgtgtttggtagctaactgacttatggccagacatcctctgccttctccaggctcaccctgatcaaggggagcagaacagctgcagcttccccaaatcccccagtctactcaccctcacctttcattggctagaactaggtcctgggccacatttctgtgaattaagaaaatgagtgggtgagggaatagaagcagggctggccaacaagctgctggagctgctcaacactgtacttggctccctttaagaatccatgtgtttctgttggctgtctgttttgacagcaaacctggatttgtttcatctctgtatttccatagcattttaaattatctagttaaaggaaggtttcacttcttgattgaacttgtgtttactgaagaacctttaaataagggatttttagctgaactttgtgtgtgtttgcttattaagttccactacaactcagtgggaaaaatgggtatcatttatcagggtctctcaaactctaatatccttttgttctactttcttctgttcttttctttttttttttttggtgattatcttttcatattttacatatgaaccccaacaatgtaaaattgaagtctagctgatacaaaactgtcaaatgtaatattgatattgaaagttagtggcatgagaaattaaagtgtgttgtttaaatttaccacaactaagataaccacataaggctgggaatggtggctgacacctgtagtctcaacacttgggaagctgaggataaaagcattgctgtcagtttgagaccactctgggtatagactgaagagacctcatctcaactaaaagaaggatgaggaaagaaaggaaaaggacgaggagacatgttagagttgtgctgcattttcacgagtctagtttgatgactcctggacaacttaagaagatagcactgtcccattatgctattttttcttatgtgccataaattagaaaattatgataaattttgctttgctaatgatattgatcttggtgtgttctaagactgagaatgaccttgaacttctaatcctcctaactccacacccttagtgctgtactgtactgtacaggcatatactatcacccccagtttatgtggcactggggatcaatcccaaggtttcttgtatgttaggcaagcagtctcctaaccaaaccacatcctaaacccatatccagcttcttcaaactcttaatcacaccttctaaaacattgaattcacaaacatatagctaatttgtttttaattcttggatctctctctctctctcatacacacacacacacacacacacacacacacactgagtttgtcatttttctgcccagttggcatccctgtgaacccccaccttgtggatcccaccacttcttttttggcttatatctttgttttgcttcaaaacatcctcaagtaacttcttaagaaaatgtatttgagagaaatttattagttcatatatctctataactccttatttcattgttatacatgataaatattttgacttgtacatgattctattgcttatggacaagcattttcctttagaatttttggggggtaacaagcaaggttttattgagaaataaataacctcctggatcagaaagggatccctaacacttgattgcctctcctacaattttaaaagctttgccctattgtctatgttctagttgccctgttaacttttgtctggtgctagtctcataactgtttcttttcctcagcttttatttttttcacttgttttttattaatcattttatttgtttacatttcagatgatatcccccttccaggttactcctccacaatcccctatcccataccccctctccacaccttttgcctctatgagggtgctcctctacccactcacccattcctgcctcacccctttagtatccccctaccctggggcatcaagcctccttcccctcccactgatatcagataaggctacatagcagctggagccatggatccctccatgtgtatacactttggttggtaatttagtccctgggagctctgggtggtccagttagttgatattgttctttgtatggagttgcaatccctttcaggtccttcagtccttcctctagctcttccattggggtccccagactcaacccaatgattggctctatctcaatatgtattggtcaggtgctgctagagcctctcagaggacagccatgctaagctcctgtcagcaagcacttcttggcatcagcagtagtgtggacgtttggtgtctgcagataggatggatctctaggtggggtggtctctggatgtcctttccttcagtctctgttgcttttttttttttttgtccctgtcatttctttggacaggatcatttctgagttaaaagttttgagatgcaggggtggccccatctcccaactgggggccatgcttatctactggaggtggtctctacaggttgtatcccccctttgttggatatttcggctaaagtcatctccattggatcctgggagcctctcactcccgtagaatctgagactttgtaggttttgctcagtttttaattttcaaattcttgttaagctctcgaattccagaatactcctcaaagttctcatttttctcctctttttaagaattactttttgtctctgaatgctctattatataatgttctgttcttatttatagatgcaatatgtgttttttttttcagtgttgggcattaaagccagtgttttgtacattttagacaagaccttgaatttttgtgtgtatggaaggctcccgtctatttctttttcatgtttaagaagacaggttctaacaatatacctctggctgacctgaaacttgtggtgattcttctgcctcatggcctcctcagtgctaggattacaggtataagacaccacaccgagctctttctctcaattttttatggtacttagtaattatttataattaataaagaagagttcaatagctattgtggatttaatgttctgttggagatctgctttcctgatccaaacgacctctgtgagggcaggggctggaagagtggagatcatagagtctactggctaaaatgaggaagaaattactcaggaattgtcagcatccatgctggaagccttggctctctacagatgttcagcttctttatagaacagccagatgttttctctttaagcccttgttggctccagctcagctgtctgcttggggagaggggtgttccaactgaaaccatcatcctgcactgaatccctgtgtgtctactattgttttatttcattttttgtatataacgtgcctccagattcagactctttgttgtttaacctgcaaactgccccctatctcttctgcagctgcctggtcaaatattttcagctatatttttccagctaccgtatttttcaaataattcttctctacattctcattctctctctctctctctctctctctctctctctctctctctctctcttgtggggtgtgtgtgtgtatgcaggtatatatgtggatattgatgcatgtctacatgtacatgtggagacaggagacaaccactagtgttggacctcaggaaccatcatgggggtctctgtaagctctactgcagggaaatgaactgcaaggggcagaaaggaaatctgtcttagccagtgttggttcaaaattctagtctgaccctgtgcggtttattttaaacttatttaagtatggtgcaattttgggaaagaaaagttccctggttacagttttctcaattctgtgtagaaaatgaatatttgggcctaactacatggaaagtcttttgcaaagtttaggtgacctctaccgtgaggatgcattctacagcttagggccctaggatctggtgtggtttctgtcatgcagatagtgttgaggtcaccaggctataaaatacttgttgacatctcagtctactgactgagaacaaaactgcggatgaaggtctagggagggagagtctgatataaactgggggaggggggatttgggtgtgacctgaccacacaggtggcgcagaccaccaggctattaacaaaatccactcccagccttctgggtggaaaagaggcatatacatcccttctgttgaagagacaagcctgcctgcatgcttcacatccctggtttctatattccttgtctatgagcacagagacttcatgccctccacatccatcatatttaaaggtgatttaaagagattgggcctatcacttgcatgaaactcaccaagtaggctgggttaggctagtcagctagcctcaggattctgcttgtttctgactccccagtactggaattacaaaattccaaacacatggctccatgttcagatttaaaaaaaaaaaaaagttttgaagattgaaatcagattctctctttttgtttgtttatttgtttgttttgttttttgagacagggtttctctgtgtagccctggctatcctggaactcactctgtagaccaggctggcctcaaactcagaaacccacctgcctctgcctcctaagtgctgggattaaagttgtgcgccaccaccgcccggcttgaaatcaggttctcatgcttgcaccatcaagcattttgccaacagaactttcaccaaagtttctttatttccttttaatcttaggcacttttctttcattgcaaaattttgtctgtctgtctgcctgtccatccatttggattggggagaaggaaagaatgagccatagcaagtatgtgaataaaggtcacaggacaatttatgggagtcagttttaggtactgggacttggacttaggtcatcaggcttagcagcaggagcctttacactgtccatcgtgccagccatggtactttttttgagtagttttaagagtaaaaaaggaaagctttgagagcatgtacatgcaagcataatttattgtctttttctattttacctttaaatgtgtatttatttttattttatgaatataaatgttttcctgtatgaaagagattgggttttgttttgtttatgagacagcatctcatgtagcctaggctggctttgaattcataatgtagccaaggatgactttgaatttctgatgttcttgccttttacttcctgtgtactggccttataattgtgcaccaccatgacaggtgtatgtaatgctacgggttatcccagggctttgtacatgctaggcaaacactttaccattgagcaacacttacagcttctgggacacttgattggtgtgtatgatggatgaatggttttgggagatattacataagtatcctcaagtcaaattgtgtttatacttgtgtagcatcatatgggatgtgccttcagtattttgaactgtgtcatctttctcatttttctttgtcattttggaattaaaaaaaaatgtcccaccactcccacagatttttggatagagtggatgtgtgtgttctattttccatattgctaaaattcttcagtttgttgagatatatacatgtagtatactttcctggttgtaattgccccactttttatgttggggattgaatccagggctttatgagtggtaggcaagtgctctaccattacgttttatcctcagactctatctccccattttaaaggaatattatttttaaatgctacactctcattttttaaatggctccttttaattctactgctaaaatacttttggtacaatatgcctttttttctattttttttttttagtgcaagtataaaatatgtcatttaaatctcttttatctaatttaaggaacttaagattttcttcccaaaatttcacaaggtaggaaaatgatgtactttatttttgtgaatgatattgcactgtagatcttgctgtttcttgctttgttctcaattaaatatcatgtttcctctacagctttatagacattttgatcagattaaggacattctaattatagttctttaaggtgtttttaaaatcatatgtaggtattgaattttattaaatgctttttcctgcatgtattgggatactcacatgatctgttcttaaaattataattgatttctaattttaaaccatccttgcattcgtggaataaaactcagcctgaaggtgtggctggagagatggcttgttgctcttgcagaggacccaagttcagatcctattctctgtatatgcaaatacctgtattctcacaccccaacatacacacacacacacacacacacacacacacacactaccactcttacccacttgttttttacatttctatcttagtattttatgtgtataagtgttttgcctggtgctcactgtggtcagaagagggcacaggattccctgagactagaattacaaatggtttagaatggccatatgggaaatcctctagatttcccccactgtagtaagatattcacttaggtgatcctgtcccaaagtcagccatcatccttattttttttctttctttccatctgatatccaatacttttggctcaatttttaacataaatcttaactatcacaacttatcagatttcaactgctactgtcctggttaaagccttcatcatctatctttcttcaactgctgccaggacctctggaccagccagttcttcattcttcactggcaacataggttttatggtgacagctagtgactcaaatatttatcaagggcttctcatctcaaaataatctcctagttcttttggtggcctaggtctctctccagtcacactggcctccttagtaaggcaggcatagtccttccttagagtgtttaaacttgcctagaatgttttccccaattacccatattgggagacgacatgagggcaaaagctagagggtatcataatagcacttcttttgtccttgccctatctatttcaaagtctttatctctgtgcaaaattttaagttctactttcttgtatgtttagtatgactcttccttaccaggagtctagtttgtctccttgttcagtactaaaacagtgcctagcaaataaatgaatagagaggggagccaaatttgaatcagaaagtctcttgttgcatagtgtttaaaaaacaaacaaagaaagaaagtctcttgttgagcatttgtttagcacaaagagcattggatgctgactggtatcagggtaaggctgctttgacaatgctccctctggcctcactcccttttatacgtacttccatcaaaccatctgattcaacaatgacagaccgatctcttatgggcttggcacacaccatctgcccattataaacgtctgcaaagaccaaggtttgatatgttgattttactgtcagccttaagagtgcgacatctgctaatttagtgtaataatacaatcagtagaccctttaaaacaagtcccttggcttggaacaacgccaggctcctcaacaggcaactttgctacttctacagaaaatgataataaagaaatgctggtgaagtcaaatgcttatcacaatggtgaactactcagcagggaggctctaataggcgccaagagcctagacttccttaagcgccagagtccacaagggcccagttaatcctcaacattcaaatgctgcccacaaaaccagcccctctgtgccctagccgcctcttttttccaagtgacagtagaactccaccaatccgcagctgaatggggtccgcctcttttccctgcctaaacagacaggaactcctgccaattgagggcgtcaccgctaaggctccgccccagcctgggctccacaaccaatgaagggtaatctcgacaaagagcaaggggtggggcgcgggcgcgcaggtgcagcagcacacaggctggtcgggagggcggggcgcgacgtctgccgtgcggggtcccggcatcggttgcgcgcgcgctccctcctctcggagagagggctgtggtaaaacccgtccggaaaatggccgccgctgccgccaccgccgccgccgccgccgcgccgagcggaggaggaggaggaggcgaggaggagagactgtgagtgggaccgccaaggccgcgggcggggacccttgctggggggcgggtaggggcgggacgtggcgcgggaggggcccgcggggtcgggcgacacggctggcggatggcgtccctcctctctaccctccccctccctctgccgccggtggtggctttctccactcgtctcccgcaatcgcgagcgacggttctcagcgcgatctccctggagccaccttcgaatgacgccctcccgctgcccgccccatctgtgcgcatcctaggccccagctgtgcaagcgcccttgtcgtctgggcttcgccagttggggctgcgcgcgctcctgcccttcttggggctttgggcctcggcactgtcgcgcgcccgcggtcccggcctctccctggatcgcgctgtccccttctccctcgcgcgcccccactcccgttacttgctcccccctcacacacacagactggcgcgcgtgcgcagtccatctcccgttgggagagtgcgccacaagggctcctgagctcttacccccatctctgggttttgctccctcctcctcctctcccattccgtgactttttgcccccactgcaagcgagtcggtccatcagctccattccccacttggcaggaacaagttgagggttattgtccacccacaaaaaggactagacattatgttcctaggtcccacaactcatcataaagagatggttgtagttctcatcaggaaccgtgggcaagggactgtgcgttcctcagcactcgaagctcttccgtgagaccatgcccgcagggtgctctggttctttggggatgctgtgctgtggcttcggaatatgagcgtcttcccaccctccctcccctcccttcgccagcgatcatccagttacataagtggaatgggacgttgtatgtaacgggctctcttcgtcctggagcgctcaggatcgccagtaccaaatggggcgagatcatcgcatcgctgtgactcctgtcacttatctttgaaagttcattctctttttagtttggttatggctgaatcactgaaaataaaacacaggtgacttttatgtggcagtggcaatgtttctgaggttttgcactaaaggtttaaagtcatcatggagtctaaaaaagattccctctcacaagagagaccctggtatgacattgttcagtatggacccctgaagggcaaagcttgttaggggatacctctatgctggttccttgtatgttcgggtataggttgatcaaaacaaaaatgggctccaccacaaatttgatattcctgactcatagtcaggcagatatgtactcttggttaattttccaggaacacaaatgggctctgttgagtcatttgcatgttgactccactgtttggaatcattacagtgaggcagtaggctcaaatacagggtggttgatgacgatcatgaaacagaatggactaatttatagtgctaagtgactgagatgttgtaggacaagttctagatattttgttatactacataaatgaaaccaatttgggcctgggtagtaaaatttcactaataggtaattattactgtagaggagaattttgggtttgtggttggaattatgtgaatctcagcaatttcaattaataacatgattaaactgatatcttaggttctttgaaatatgtcgaatctctataaaaagataaaatttggattgttaggtccttggggagtttccaccaaggatttggaaaaatatatttacagacttttggtttttcgtttgtttttaacttcaaattcaagtcatactcagaaagcctaggaaacacttgcttttattttcttacctggatatgtcagaaccttaaagagtccaaacactgtaaaagtacaaatgatctaaaatgagttaatacacatggccgacagagtgcattcactttcacaaacacacccaagtcttgcttgtcaaaaaattccaaggtttgtacatctgagcctgagctcagagttggaacctttactttgtttttatattcttacaacaggtttgcttcctcaggtgcccctctggttatctatttgttgtacccatagctctttaaacatcgtaagcaacttctagaacacagtttcctttcaaagtgcctggtgacatctgaagctagtgtgtcctaagaatttgaagaaactgtatggctttcttgctagtattgatctatcacatatgcctattttctttccatgagaatgtgtcttgagtactttaaagctacagtaacaggtcactatttcactgaagaagaaagcatcatgttgtccattgtactctaaggattatttttttccttttttttttttgttattgttatactggtggtcaaacccaggacctcatgcatgctaggcaatcactccacatccttagccttctactctgttttttgtgctgtttgactcctgaggtacatatgaccacaaagactacacatagaccacaaagattttggaaggttatgatatgtttttgcaatctgtgtattttccagatagagtggttcactctacctgatctgcttctatgaagcctaatctattggggatagggaggcaaagctatggagtttaaggagaaatcagctaaacccttgttccagtgccccaactccacccatgaactcctgagaagttttttttttttttaaacctaaaataaagagcagcagaggtaaacgtgttagtttgtttgcatggtaaatgatatatcctggaacctgttatcttttctaaaggtaattgtcagtgagaatctttttttttattcattattctcatatattgcatcccaactgtattttccacttcctcctctcctctcagtccctcactcctcccttctccttccccatccactcatccttttccctttagaaaaggcaggcctcccaggcatatcaatgtagcatggcatattaagtttcaataagactagtcaccttccctcatattaaggcagcccactaggaggaaggggatgccaaaagtgacagagctccccactccctctgatgggagttccacaaaaacaggtcactcggtggggaatgttttaattggctaagagcagtttaccaccagtgaactacttctgggaagcatagactgatggacaatgacatttctagtagccagtgtttttaagcgcagcctagactagagaattccaggaagtgtggcagaatatctcattttaatcacctgctctggtaacatctgtgcagcaagccatgtggctaacagaaacaatctttttagttgggtagaaaacactattgttcttccaagggaaggacattgtcctcagtgcccatcacagccatttttaatcactccgctgttgtccaatcagagtgctgcacctgctcatcatttcagggagtccagtggctccctacttctggggctagtttatacagaaggtgtgtgtgtgtgctcttctgctttctacagctctcttctgcctttctctcccaaggaacattttcctttgaaagtttgatttcaatcacttttatgggaaatatagtgtgtggaatgtctgaatggtggcaagactcaagagaaggcagacgagcctactcccatgttaaagggggaaatatgaccttttcctggacactgctagcatgtgaatgtctgctcacctagctggtactatggatgtctggactcttgttactggccaagccttagtaaaagtgtgcttatcttttcctaaaagcagggggtattttagtatgaatatttttgttggattttcacctaactgaattcatttttaactttttttttcatcaaatctcaaacttttttaagagcttagaataaagctgagttcagcttctagtgaaataagggctgaagatatagggctcagtcagtagtgtagagcatttgcttcacatgctcaaggcactgatttcagttccatccttacaaaaaaataaataaataaaattgcaggtaggtaaaactagtcttgagaagttgtgactttgcaggccttcttataaacaaggcactggtttgagtttttttattaggctgatatccaaaaaacaattaactttgggatttcaaactgttccatgacttaattctatgatttaaggaaattatagaaatgaagaggttttgctgagccttaaaagagaactgtaagcatcgtctaggtaaatagcatacagctgcaaaggacttggttgctgttgcctttcctctggattcaaccccatgagtgactataatagacttaagttgtatagtataagcttttcttttagtgtaaagataaaagtgttattgctgggagagccaggtatctaaaattaggtatttaggtagctaaggctttaactaggaaacgatggttagcttggtggcaacagccttatttgaacatgtgtgcaaaaaaaaaacaaacaaaaaaaaaaaaaaacgagagactgaagccggaagaactgagtttgaggacagcctgaactacataacgagactgcctcaaaaacaacaatggggggagggagagcgctcagctgtttagagcacttgtttatcttccactaccttcatagaggctcacaatggtctaattccagtccccaggacccatcttctagcctcagcaggcactacatgtgggtagtgcacagacatacattcagacaaatgctcatgcacataaaataaaaataaataaaatctcaaaaattttaaagaaaaacagtaacaaaaaggtcaaaaggatcatcaactctgtgttacagccattgagatgtactgaattgagagggttacagaaattggttagagaaggacttatagtttggatgatggctttggatctcctggtgttttgtcttttatctcagggtgaaaacccctttgtgatgttagagcagttccttgcagctttgactgctggaagcagaagagagacttttgcctctggatttggttgtgttctttttgaggtgatgtgtgggtgtttgggttttttgtttgtttgttttggtttttggttggttggtttttgttttttttggggtggggggggagttggttgttttgttttgatgttgcatatactcttgaacacattctatccttgacttttcctgtatagtgtggtggaagaagtacttaagcagaagtcaccacttgtggtgtgcactgtagttccaaagtgttccccagaggtgtaaggacctctgatagtgacgcttctgacagccataactcttgtctttattttagcattctgtgttttgtggcagtaatttgcagtttattctttgcttctaactagctgagctgggaagtaacatagtatgttgtctgtttatcttcagaatgttccaaaaagccttgggaaaaggtgcagctcaatggggactttcaacttacgattttctttgttttaggctccataaaaatacagactcaccagttcctgctttgatgtgacatgtgactccccagaatacaccttgcttctgtagaccagctccaacaggattccatggtagctgggatgttagggctcaggtaagtaaccttcctttttttttttttagtatatgtcctggtttggccatctgtttttaaaaaaaaaaaaaaggaaaaaaagatatactattcttggacagtatgaaagtaccccaaagacaaaaaatataactgggccaaactgtgccatataataaaaaaaagtcacttccctgagccctgaaagttcagttcagtttgggtagagttacttggtagccacagtgtgatctggggggtgggtgtcagattagagctggaactggtgatctgcagcttcagttcaccttgaagcaggagagtgcttggcctgagctcttcacctgtgctgctgctcttacctagtggtcttcagcatgatgctttctttgatttggtttgggctaaatgacttgcaggtcgatgttagcaagcagtggtgtgctgcattttcagatataggaactggtatgtggtccccttagaagagcacctttctgaaagtgtcacggcacaatggagcctgtggttagtggtgcttgcttgctgacctctgatggatgcatccagacagatgtgcgactctcgggattctagagcaggaaaagctggaaagcccagttgtttttcagacctgacaaatctgtactgtgaactactgcggtaccattgtgtggactttagtttttgcaagaatgacttgttctgtaatttcttatcctttatcaggctcaaacctctcaagctttttttaaattagtaattattctacatttgatagtttgtcacctgtatttctgtgtgataaaacagataatgccaattgacttttcctatcttctacaaaagaaaatgttgactgttcacacatgctgtgttttgattgtagcagagatccccagttagcattttctgtatctctaaatgtattacacactgtacagacgcaacacacatgtacacacacacatagctgatttatggggggggggggtaagttttgggtggaggagaatagaagaaaatgaagatttgattctgcttctgatactgtgacgtcagttgtcattctcctcactgtcatgaggtatgatccagacctgaccgatctttgtgcttcacacatttatgctggtgggagttatatggctagtgctttgtctcaagaattctactaaatgtaatagaagcactgatgggtagatgttaggctgggcgtggtttgcggtttttaaagtctttttctcagtttatgaatgactctgggaaaaagacagtaatgatactatacatgtttctccagagaaagggtggattttttttttttagaaaaagtcttttttttcttttatttatttatttttattagatattttctttatatacatttcaaatgctatcccgaaagttccctataccctccctccgccctgattccctacccacccactcccatttcttggccctggtgttcccctgtactggggcatgtaaaatttgcaagaccaatgggcctctcttcccagtgatggccgactaggccatctactacatatgcagctacagatatgagctctgggggtactggttagctcgtattgttgttccacctatagagttgcagaccccttcagctccttggctgctttctctagaaaaacaaccatttcaggtcaaacaatacaacttttttctagaaaaatgtatatcttttcttcttaattaaaaaaaaaaaggaaaagaaaaagccaagcatggtggtgtacaactttaatcccagcacttgggacacagagataggtagatggatttttgtgagcatgaggccagcttagtttacatagcaagtttcaggctagccaaggctacatagcaagaccttgtatcaaaaaaaaaaaaaccctataaactttaaattagaacttcttcatcagctagtcattttgaagaatggctacctagacttggaggtactggtaggtatcacctttctgaaattcttgggacttcataattagatacctattttttaaatcagtgttctttttgttattactgagctgtatctcagtaattattggccatttgtatctggcctatgtgaactatatgttcatgttctgtatttattattccatcaggatattttttattaatttttaattctttgtgtgtgtgtgtgtgtatgtgtgtgtgtttaattctttttctgtgtctgtggggctcacgcggaagatgaggggtgcatatgagttcaggcacctacagaggccagtggtagatcctcttggagttatagttatggacagttgtaagctacctcacatgactgttaagaaaccaaacacaggtcctctaccagagtcacaagtgatcttgacttctaagccatctcttcagcccccaagatacttctttttaagtgggtctgtaagaagccaggagctatactttctagatctactgaactgaatacctaacctgtttgtccttctattatataaaatctcaggcagcccagtgattagcttagtgggttaaagatgcttccatcaagtctagtgacctaaatttgatctccagaagccatatagtggaaagagagaaccaactcctcgaagttgttgactccaacaagctatctttagactgtagcacacatgtaacatggacacttaaaaaaaaattaagatttcatttgctcctagaaagtgttttctggaggctggagatactgtttagtggttaagaacataggaacacttgctgctcttgcaaagggcctggatttagtttccagaactcacaagggtacgtaactcttgttccatgagatccagtgccctcttctggcctccacaggcatcacacatgcatgtggtacataaacttacaccatacaaaacacataaaattaattttttatacaggaaaatctttttcttctaggagttagttgatacttccattttttttctgaaaagattgatgtattttcaatgtatacatatttaatgtatcataagttcctgtttgtccacattcctttttaagttgtttttttttaagattttatttatttattatatgtaagtacactatagctgtcttcagatctcattacagatggttgtgagccaccatgtggttgctgggatttgaactcaggacctccagaagagcagtcagtgctcttaactgctgagctatctcaccagcccttaaattggtttttaaaattgtgtgtgtgtgtgtgtgtgtgtgtgtgtgtgtgttaggctaatggatcattaggcttagtggcatgcagcccttaggtagtttttaaagttagcttataaaaatgatggtcttattatggtattttcatatatactctgttctgttgctcattcttccccattccttttcctgttctcctgccttatccttctggtcctcactacagaaccaccaccaccccttctctagtttcatgtcatatgttacctgtttccccttaagattgccctgtgttttcccaaatactggtttttatatttaactttgagatgggatgatttccggagtatgcttgagtttgactttggtaaacttgtcattcagttttcaaattattattattgccttccacatccagatctcttttcttttataatgctgcagttctatgctcactgaagactaattttcgcttcttgcttcatccctatcctttgctaaaacactctcctactggctgtcaataccgtctagtgccttactctgaatgtttatgcatgtgcattttatgtattttgtatgtttacacatatacaaaaagtatgtgggagtatatcttttacttgaaccataaaatatggcacatagttgcaaagcttgccttctagttaatgtatcttggcgattatctggaattagtttatacagaaccatatcattctttttaactgatgaaataaaatagtctatttatggggtatgctataatacatttgattttctattaatggatgtttgtgtttctaattgtcaaaatgtcatttatcctaccatggtatggtggcacatacctttaattccaatacttgggaggcataagcaataggattattgcagatttgaggccaacctgttccgaccattcagagctacatagaaaaaccttatctacctcaaaatgttgatgctctatgtgttagttagggttttattgctgttaaatagggcttattgcatggtcaccatgaccatgacagctcttatacaggaaaacatttaattggagctggcttacagtttcagaggtttagtttgttataatcatggcaggaagcatggcagcctacaggtagacatggtgctggagaaggagtcaagaagagttctacatattgattagaaggcaaccaggaagagactcattccacattgggcagagcttgagtataagagatctcaaagcctgcttacacagtgatgttacttcttccagcaaggccacacctacttcaataaaaccctgccttctaatagagccactccataaggccaagcattgaaacaaataaatctatagtgctcaaacctattcaaaccactatactatacattttttcctgtatttagctcagaggcaagtttatctgtaagatagagttctagaagtggaacttgctagatcaaaggatatatacattttaaattttcaaagtatttctgaacaaaggggtagccatttagttgtagacttttagggggaaaactataaatagataaatacacgaatttatgactacagtactatttttagagattagagtgtagttgggctaggaggaagttgtttttagcagttagcactagaaaccaaactttggaggcttccatttcataaaatatgatcttgtgtaagcagggcatttcaggcaagacattttacttgatgaggggaatttcagctagttcctatttatgaatcttgaagaaaatcaaatggttttttattttggaccattctaagttgtggtagctcctttggattcttggctggagagtatccctcagatgctggaccttctgcctacatcctgttttaatttgcacaaagaatatcctgtaagtatttgggaccaagttgctgttgctttatttatttatgaatgttgtagtgtatatagcagtactttattcatgtgatctctactgatcgagcatctgttatgtgtgctaactactgggactgtccttaccctggcctaatgtaggtacggatgggcaaatgggctctgattttccaaggggtagacaattatgattgtgaagagtgtctgccactgagagagcacataaaatgttagatttagctgggcggtggtggtgcatgcctttaatcccagcacttgagaggtagagacaggtggatttctgagttcgaggccagcctggtctacagagtgagttccaagacaggcagggctacacagagaaaccctgtcgcaaaaaaaagcaaaaaaaagttagatttatgggatggaggcagagaacagtttagttgtctttttcttaaatggcagtcagcatctgcacagtaaggaaactttagctgagtccaggagaaagcatcagtagaaaaagatgatgagtcttaaaaatagacaagaatgcctggtagctgaggcaggaaagaatatgtgtctggctcagtacacagacataggcaggtgtgcatagtcagctggggcctgaagatgggagctcttacgttttggggcatgtagtatgatgttcaggcagctgtatactagtcacacaagccaagatacagcatactcttaagatactactcttatcctcagagttaccaagcagtgctctgtccatttatcctgtactatttccacaatgaatttattctgtacttactctaaggacaatttctgtaaccttcccattctacctattggagctccagggttcccattatagatctccttacagaacctccttcccctccatacttttgtcccaggagattggtagacacttaagtaggacagggcttctccttccaacatattctctattaacattattctctattaccatagtaacactcaatagtgccagcctatgaggtagtccagagcttgtacaggagcaaaagctatctttggtattaaatgatacttctcttgatatttttttattctatgaaaatactttaccactaagtcatacctgcagccttaaacccttactgatttccatcagttttttttttaatgtgtgtatatttttgtttttgagacagagttatgctgtatagcactggctggcctagaatttgcagcagtctttctccttctggtttccaagtgctgggattacttactggtgggaaccactatgcccagttatttggtttttttttttttttttgagacagtatcatatagcacaggctagccttaagatcactatgtagctgaggctagtcttaaattactagtcatagtcatcctacctctacttcacaagtgcttagattagaagtgtgtgtcacaatccaggcgtggtggcgcatgcctttaatcccagcactcgggaggcagaggcaggcggatttctgagtttgaagacagccagggctacacggagaaaccctgtctcgaaaaacaaaaaacaaaaacaaaaaaaaagtgtgtgttaccatagtaggctttattatttttttgaacaagactttgatagtaaaggaagtgtatgaacaaacttgtttctttcctgtcatggactaggtctatcctgatgagccaatgttaacagcagtcctctaattctcccaacctgacctcagggactgaaactagaaccttctccagatcctctgaactttttgctcttctgttctccctaggtcattctgtggttgttttcccagtctttttagcccttgtaccctacccacatgtggtagctacttacatactttttgacccaaacataagtgttagcaatctgcatgcgtattcatgccagcctccttctgtagaacccagaaacagtcccagctaaactccaactcatggtaatttccctgcctccctaaagtagctagtctactaaagttgatcaggacacattacattccctgcaaggttgtgttgtacatatagcatattctacagtgcaggatgctattgtatgcaactcctttcttttttaaagtatggttatattgatctttgcagaccttcttcatttgtgtttccttttgctatggaaacatttttgtaacagaaatctaaccagagttttcactgagaatagattagatagaagcaaggattggtatttgctttatgtttgtatcctttggtcttgttaaccagaagttgttacatttctatgtttataaaatctttccacacacacacaaaaattgcatctatgtctagactttcctccttgtctcctttgtaacctctgtatttctactaaaccatgaatttaatactttggcagcgcaatcttaattttctccatgtaagtcaattttgaaaatcttgaaatactttttggcttgcttgaggcttctaataataccttggtattctcctctaacctggggccatagctgatgcatttttataaatgatttgaacagtttatactaatatatatttatgcttacttgcctaataattgacagttgttcatctttgtccagttcctgataatcctatatcttcattagtttgtaccttataaatgaacagattaagtataccaaactactaagggaaaaatacattgcttgaggtatgtattagcattgctttgatgtgttgtattctaatttttcctacacacatttggtaatttatttttaaaatatatggttccatgtgtttctaggttttgtgtttttgtaaacagcagaaggtattagagcatattaagaactaatttgctctaatatttttagctgtttttggaattattcttggcaaaaaaattagacaaacgtctgcaagttgtgacagtttggcttttgtttgttcttttaaattccaagataaatagatatagtgatttttttttttaggctagtaaaactatgggaatgataaaatccaagtagttaggacagttgaaagttgtatttttttaatattttttatgtatatgggtgttttgcctgcctgtgtatctgtacacagaatacatgcttggttccttgaggaagccagaagtaagtttcagacaattttgagtcaccgtgtgggtgctgggaattgaacctgggtcctctaaaagagaagccagtgttgttagccagagccaactctagccctgaaggtgtgttttaaaatgttaatgtcgcttataagtacttgtataatatttcttagatgttcttccagattaatataaaacaaacaaaaatatgatacttttaagctttttgagctttggtttttttttaagtagcatgtcatgtatcccagacttctctcaaactccctatatagctgaggatgaccttgaacttctgaccctctttcctccacaactgctgagattatagacatcaccccacaaagcagagctctttatttttcattataaaaatggaatattatagtaagaaacttggaaaatgcatataggtacaaagatcaaaagttaaaaaaaaacatcctgctgagcctggtgggacatgaatccaggactggggaggtagaggcaagatgggtctctaagttcaaggccagcatggtctgcatagtgaattccaagacagccaggacttcaaagatagccattctaccttatttttaaaaatcaaaacaacaaaagtaaaaaatattctgataattcaccaaaggaaactgttattcatgtgctcagagataaggttgtagctcagtagtggaatgctaacatggtcatagacctgaatttagtcctcagtaccacaaggaatatctttttagatttctagattaagggctttgagtcttagctcaggggtttgtgacctttgatgggggaaacatttcattgttattcactgacagttgtagataatagattatttatagtactgttgggaatagctctagctttgtcatgtagctcagtggtagagcacatattcagcatgggtaaggccctggatttgatctctactaccaggaaagtatgtgattatcaccagtagagaatagaaatctttgcagcttacactatatttattgtagatatttgaaatgtcatatgtgttcataattgtttgtaactttggtctacctttggatctgattaatgatttaccaaagaagtgcattttattctagcacaaatttgtcataaatcagtgtctatatattttatgtatttcaaatcatttcctgagaaggaattcagaaaacaaaaagggttcttggccaaaaaaggggggtttacaaatacccatctgaaagtatagcttattggtaggatgcttgcctggcatttgtgagatcctgagttcaatactgaaatcttggaggtagggtggggagatttagatggtgtgtttattatcccatgcagcaataaacttttaaaaaattatgtcgggtttggtcagtacttgggaccccatcataaataaataattaaatgaccagtcactttgaaaaatacctcaagaaaactttagaatcactgggtaaagtgcttcattcatatatatatatatatatatatatatatatatatatatatatatatatatatatatatacacacatacatacatacacacacacacacacacacatacatacatacatacatacatacatatacacacatgagaatctgagttctgatcgccaacaaacagatatggcagagatgaaagcaataggatcccaggggccctctgactagctagtctagtcagtctgtgaggttcaagtttggtgagagacactttctcaaaataaggtggaggatactgaatagaacactcagtggttaagagtgctttctactcttgcagagggcttggttcagttcccagcatctatagcagctcacaaccaactgtggctctagaaccaagatatctgtcaccttcttctggcctccttggccacctgcatattcatgatacatgtacatacagacatgcacataaaatagtcccttaaaataataaaaaaataagctgggacgcaatagaggaagacactacctgctaacctctcacttctgtatggcatgggtatacacataaataagtaaaacttgtaaaataagttatcaatgggccagaaagatggtttagcagttacaagagcacccatatctcttattagaggacccaagtttgaaccccagaacccatgttaggtagctcacaacaacttgtaactctagctccagagagatccaacatctctagcgtccatgagtgttttcactctataccacttaaaaataaatctttttttaaaacttaaggtatctgttgtggtttggtctgttattgtatattgtaatgctaaatgtgggctcccaagacctggttgtcccagagataagagacccaagtgatgctatgtgaccttgcccccaagttatttctgatttgtgaatagagatgcctatagcctatagctgggcagaattgagatagacagggcttggtgttcctggccttgtgggtcagagcagaccacaaggagagagagaagaaggtggagagaggagaaagacaccatgagttaggagtcaagaaagcatacccatgagagttggccaattggagttaagaacagcacagatgaaacatagtaaacataataactcagagttatctataggaaaataaattctaacaacatagagggtagacagctgcccaactctagtgcagattaaaacttattgtaaatcataaaagttatgtgtcttttatctgggaactaaatgatcaaaggcaggatagaagccctagattgatattagatatttctacaattggtattagtacccaactaagcagttatatagggaaaagcacaggtatacgaaaaagacaaaggaactggagagatggctcagcagttaaatagcacatactactcttgcagagtgcctgggtatggttcccagcatccatgttaggtgggtcaccaactacctttaaatcaatctccagagggctccaaatgctttcttctttcttctatggatactcatactcacatgtgtgtattaattacttctatcccctacttcataattataatttaaaaataaatattttttggtttttatttttacaaaatgaaatttaaagcttcatctttttattttgagatagtgcctcactgtgttgaagtagaaacttaaggtttctttggaaagtcagttgttttggatgatgttttactggggcaatcacatgaaggaacattttgttgaaatggacgcagaagaaaggatgttttgctaaagcaagcacatgaaaggacatgtgatgaaggattctttgcaaacgacacacatgtattggtccaccttacgttacacagttgagctgcatttgttggaactccatagagagaaccgcaccaaaaccttctgatgatgtgctacagtgtcttgctacttccacagactcagaatgattggcagagtggtgtcagccgagacagatgcatgtgctgaggcaagacatgtgaaggatacgtgatgtgtggagggtataaataggactctacggacagtgatggagcccgagcttggcttgcttacagacagagctacttgtgccacacttgttggtctcacatcttcgctgagaggcacagctgagaacttctcctggcgtccctccaggtccctcctgctgacttatgccaaggctgaggccgggctttctctgctaggtgaatcgtttttgctatcctgcgttgtgtacaagtacatttacctgctgagccacctcagcaatccaaaaatctgttttgagtacttaatgccacatcaatgacttaatatttaatagcctaaaagtttatattaatagcctatgccattgacattttaggtggatttttgttgtttttcctttctttctttgaaacatctcaatgtgttgcacaggctgacctcaaacttgcaatctttctgcctccgtctcttgagttctgatcacaagtgctattggcattttaaactttcttctagttttccttttccttcctgcatacataacattttagggagtgagctcatctaacatgtaatctgccttttttccttaacatacctctgcacagcagtaaaatagatggcgtgaactctttccactaaaataaagagaagctcaactgcatttcttactctaaaaataatagtgtatttgaacttgtggtcctcctgcctccaaaaataaaaataatatgcacttgatagaaaaggtttcataaaatatagaaagaggaaaagtagatattgtccataaatttgccatagattggtagctaacagctgaataagatttttatagtactatttttggtccccacatatcatttcaatgtcattttataacttgtcaagactgtgccatcagtaagtgacatttctattgtttctgccttttcattactctgaaatgatgatgtatcagcaagccagtggaaccacctctacctgtacccaaaccttccgaagtctcaaatgtaatgagttctttagatatacttgagttgcccattaaacttaaagtcctaaacataattcttaacttcctctttaaccttgttccatctgctctttactccattttaggaaataataccaatatctaaccagttaatccagattcaaagagtcagtcttgattctgctctttctttcaccatcttttaatagcacttcatatgagtcaagctgcttctcatcatttccactgccaagatctcagtccaagccacgaatcgcctctcagatggatacagcagttctttggatgacatgtcaaacagcatcctcattgacatccttataaacctaggtctcttggttatactgacacttattttttacataatgaactttttgcatattccatgctgaagcatatgcagtacattaagttactatcattcattcatctgacaatggagtgaaatgtctatagtggcccaagcactgattttaggcaataagatttttatagtactattttatagtactattttattttatggataggatcaccatgctaggtttttgtctttctgagtctggcttattttaggtctcatataagtgacctccttttgtttttccttccctagatttttagaatattctctttatcctctgtgttctgaaatttaaagggactgtgtctttcatttcattgttctagagattgctcagtcagaatagttttgtctattgttgtctttttaaaatcttaacttcttgggccagacagatggatggcttagtagttgagagcacttgttgctcttgtagagggcccaggttctattcccagcacccgcagctgtctgtaactccagttccaggaagatctaatgtcctctgctgtcctccatgagcactgaatacatggggcacaattacttggaggcaggacagtcctgcacataaaataaaaaaaaagagatatatattctgttcttttctttttaattttggaaccttgggttgctcctgtatcaacttttctggaactctctttgtaggcttggctagcctggaattcagagatctgcctacctcttcctccctgggtgctgggatttaaaggtgtgtgccaccaccacctgacttctcaatatttttttaatttccatttattggagtatgtacaatttttctgttgtaaccaacaaataatctacatggtttaagcaccatacaaatatctttgtttctaacaggtattcacttgatgactttagcattcattcataattcttacctgaatccattattttactatgtgctgcaaaattatggtttatctaattctgtcatctcccagttgccatccctctgtaaagaattatccgtaaggaggaactatttctcccccaaaaggtacagatttttactggattgattactaaatttcaaagtagaattagtgattattagtgacaacatatttgttgatacgtttttcatgttgatggactcctgaagttttatttattagaaattttagaattcagccagtctatggtgacacatctttaatcccagcacacaagaggcaaaggcaggtggatctctgagtttgagtccaggccaaaactatacagagaacttgtctcaaaaaaaaaaattaggccggacgtggtggtgcatgcctttaatcccagcactcgggaggcagaggcaggcggatttctgagttcgaggccagcctggtctacagagtgagttccagaacagccagggctatacagagaaaccctgtctcaaaaaaccaaaaaaaaaaaaatagaaattttagaattcagctacagtcattgttttgtcatcaaatcattctgaatttggacattgaagaagctctttatattgatgcctgtgctctcttgtcacactcttattaactagtctttgagcagttctcttgttttctaacaccaaatattgcatcccaacatgtgcttttttggtcccagaattgactgcaagaatcgctggttcattatagtggtaaatggtatttagatccccaagtgtgtatgccagatgtgatttatttttactgggttaacagcacatctagaccctttgggtgagcaaagctgggaaaattatttaatttttttaaaaaaatcatgattgtataacgaaatcaaagaagatatgactgaatgtcacgttgataagaggtggacttgtggttgtcaacttgactacatctgtgattaagcagctgggcataactgtgagagatttttttcaaagacagtttttagctttcagtagtctttaacttatgcccatattttttttcttcactgaaaatgttgatttctaacaatgctaatattcacacttactggctttgttttgtaatatgtataaaataattacaagggacagaagagatggctcagtgatgaagagtacttactgctcttgcagaagacctaattctgttcctagcatccacaaggtggctcacaactatctgtaactccagtttcagtggatccaaatccacccctgccagcttcaagtactcatgtgatagatgcatagacagacatgtaaaacattcatatataaaataaaaatataaaattataaaactaatagcagtattaacaaaagttgatgcatcaggtttttttttttttctgttagaaatcttactaccgatgtaaagtcaggatatatgcataaaaattacctgctatacctgcctggcctgtggtgatacaggcctttaatcccaaaactcgagacacagaggctgaaggatctctgtgaatatgtgattaccctggtctatatagtatgctccaggactacatagtaagaccctgttttaaaacaaatcatgtggagtgtttgcttttgttaatggcagagtaactcgtttgctctacttttcttacaaaaactctgatacaacatacatacatacatacatacatacatacacacacacacacatacacacacacacacacacacacacacacacacacacacacacatatatatatatatatatatatatattagtatgtcttaacagactgtggtcctgctagttcagcaatggctgtctaccaacagaaggtccaagaatccagtagttgttcagtccatgagacttgatgtctccactggtcattagtatatgccagaatctcatagaagtaagttctaataccagtgaaagaatggacttgccagccagaggggggacgagcagtcaaagagagtaagcttccttcttccatgttctttatataagcagccagcagaaggtgtggcccagaataaaggtgtatctttccacctcaaagatatggattaatggtgtctctttccactttaaatgataaaattatgaaaaaaaaaacacagttacgcccagctgcttaatcatagatgtagtcaagttgacaaccaagaagatcgaccacaagtccacctgtccacctcttatcaatgtgacattcagtcatgtctccttaagtcatgcttaatttccaaatgaaaacaataaccaggtcataattctaacataactatcccttctgcaaccccaaatgcattataaatttttgaataggtggcaatgtcccttgagagatactcttttagtatctcaaacttaagtataaccactaatattctcttaattgatgttgcattacatgataaagaaataaaggaaagaaaatgcaaatatacaaagacattttaacaaaatttgacagaaacactaaggtcagttataattctaatttctggaactgtcatgtggccttatatttatagcttccttcctctactacccattctgtagttcctgaacccttgttaagaactcatcaggtctctcttcttggaggtgtgacccataccttcattcttgaagggtctgtaccctttatcatcctgcctgcattaggtgttatactttgccattggctttaaacacggggcactgtagctccaagagatgctctcaaggatctttagcacttgagacaatctttattaactccattgtggagaaacagtccaatccctcttggtaaccagtcactcttcctaacactgttagtcctttcttagctattagtttaagggcatcagaaacccaaaatggccagagggaagtttgaacttctagtttaatgaactatttcttacgtctttaggcaggagcgctcctgactcaggaaccaaaacttctaggtcagcagaacttaatgtcatgggaacaagaagcaaaaaatttttctagtaggccactagggggaatagtgagtggaactattccttttacccaccccttcatttctgtacctgtggatcctgggtatgggagataccataccatatattggttgctgacttccgtgctgctgccacttagttggcgctgtgactgcatcttcaaaagccatgccatctttctatcagaccagctgctttaggatggtgagaaacatggtaagaccagtagattccatgatcatgggcccactgttgcacttctctggctgtgaaatgagttccttgatcagaagcaatactgtatgggataccatgaggatagataaggcattctgtaagtccacggatggtggttttgtcattacgtgtaagaaaggcaaatccatgaccagaataagagtatctactccagtaagaataaaatattgccctttccacggaggaagtggtccaatgtagttagcctgccaccaggttgctggctggtcaccccaaggaatggtgccatacctggggctcagtgttggtcttgctgttggcagatctgacattcagctgtagtgagttttatagtggcatgacttgtatgaacttttggtactgtctaatttacttagtcatggtgtttctagacatgaaatagataagcctattgaatttttgtttgatctatataagtgggaaaaaaaacttcaaacatagcctatatatttgatggtagcaaaagggagtcttgtaccacaacccaatttccagacttgagacggtatgcagacccagaactccctgaaggaagggatggccaagttatcccaaggaagaaccttgatactgactctgatttggggagaccccaagaagcatcatgtccttccagttaaagtaagggcttggggatgtcaaataatttatggagttttggtgaagtctgacatacaataggtctagcaggtccctgaattcatcctgtggttatttccccagcctcaattgggatagatatacttaaaagttggtaaaattctcacgttggttccctgatctgtgcattgagggctattatggttggaaaagctaaatgggagcctttagagttgtctctgccaggggaacaatgagttaaaaattataacacatccctgggggaattgcagaaattagtgccaccaaggacttgaaaagtgcttgaacatggtatacagatattagtagagcaaatgcccttttttgttacctgtccataaagactaccagaagcaatttgctttcagttggctgaccttgccaatatacttttagttttacctcaaaggtatattaactctccagccctgtgtcataacttattttgaagggaccttgatcttctctctcttccacaaaatacacattactttaccatgttggttggacaaagtgagcaggaggtagcaaccaccttggacttgttggtaacacacatgtgcatctgagaatgggaaataaatccaaccaaatccaagggcctttttcatcaataagattattaggagtcaaataatgtgggaatgcagaaatagtcattctaaagaaaagagtaagttattgcatctgtccctgccatcaccatgtaaaagccgatttttggtaggcttatgtggattctagagacagcatactcctcacttgggtgggttgctccagcccatataccaactaactcagaaagctgctagctttgagtgggccctggaatagaaggctcttcaacaggtccaaattgcttgagcaggctactctaccacttggactatatgatctagcagacctgatggtacttgtgtatcactggcacatagagatgaagtctggatccagtctttggcagaagagacctttgggaattcgatgcaaggctctaccatcatctgcagacaaacactctccctttgaaagacagctctgggcatgctattggactgtagtggaaactgaacatttgacaatggactaccaagtttccattcgacctaaattgcccatcatggacccaccaagtcataaagtaggacatgcacaacatcaatctattattagcacctgagtacaccaggacttggtttactgatggttctgcacattatgcaggcagcacccagaagtggacagctgcagctttacagtccctttctgggacaaccctgaaagaccccagtgaagagaaatcttcacggtgggcagaactcggggcagtacacatggccatccattttgtttggaaggagaaatgtccagatatgtgattgttagtggattcatggattgagctgatggactgactcaatagtcaggaacttggaaagaacatgattggaaaattggtgagaaagccatgtgagaaagatgtggatagatctctccaaatggaagcatgtgaagatattgtatcccatgtaaatgctcatcaaaaggtgacttcagcagaagaggagctcaataatcaagcaagtagatagtatgccctgttctgtgggcagtcagtctctttccacagccatccctgtccttactcaatggacacatgagcaaagtggctatggtgggagagatgggggttatgcttaggctcaacaacatggacttccattcaccaaggctgaccttggtgtctatgctgccagttatgataactatgatcactttacctttggcaattcagtgctcccatctggtccctacaactttggggcccaattaaacccaccacatttaattaatccaaatgagcaacaatgtctctaacctgaagatctggcataaggaaatgggcaacaacaaagctcttcagatgtgttgtacccctctctccattttttgtcttataggatcagtgaagtgtatatcttctgggccttcccattatgaaggattaggttttacatagcatacccactctagcattgcaaattccctgaaccttaaaatcccgtcatcaatgctaagccaagggatatcaggcatctcccaactcctttttcagtaggccatcttttgacaaatctaactgtgcagtcttccatatctaacctagaatcttcacttgatggtccccaaatcagtaaatgctgcctgacctattaacccacacccctagaatccattcctacacatatttcccagaattctgcttggatgaattagcaaacacattaagttctttagtagtgtagtacacctcctcatggagtacactttctgtctcccctttaggagcctacttaccccttagtttacttataggtctagaggcaactattggtgggccctgaaggacatagtattatcagtattttcttcagagaaaaatcactgctggtttagcagtcagtgaaggatcaattttcacagtcaaaggcagaaaatgcaataattcaggttttggggttgggagtacatcttctgctgagggtggagaaactacttaaactacttactcggatgagattaactcttttttttttttttttttttttttgaggtaaactcttgagagttagtggcaaagtagcccattttgctctacttttttttaaacaaatactcaaaactcatattcatatatatatatgcatatacatacacacacacacacacacacacatgtatatgtatgtgtgtataaaatttattagaatgtcttacagactggtcttgctggtccaacaatggctgtttaccaacagaagttccaagaatccagtagttgttaaatccatgacacttgatgtttctccactggttattagtttatgcagaattccatagaagtaagtttaatgccagtgaaggaatggacttgccagccacagagagaaagcaaacagtaaagagagttaagtttccttctttcctgttctttatataggcagctaacagaaagtggggccagactaaaggtggatcttccctaaacctcaaaaaatacagattacaagtagtgttgacatttagtctaggctctgttccagttacctggcaacagccaggtgtgcctgactcactataaaagaggctgcttgccccctcctctctctcttgctctctcctcttgcttctgctccccctatcttcccattcctctcctccctctccacgtgctcatggccagcctctactaccccctgcctttctctcaattcccctccccagtgcctgaataaactattctatcttattccaggtccttcaagagaaggaatgcctcagcgtgggcccacagaggcaaggtcttaccccacaccatacctcgcctctaccaaacatattccttcctctttattttttttataaaacataacaagtaggtcttcctacttcaaataacttatttaaaaaatccttcacatatgtacagagggtcttgggttttgattatttctagatatagtcaagttgacaaccaagaatggccatcacactaggtacagtgatacataggtatcatcatggtacacaggagatagaggcaaaaggatctgaagtttaggcttgtccttagctaccctaataaattcaagggcagcctgagatacatgaggttctatctcaaaaaaaaaagtcacagaaatttaaaataactacttagggcactggagaataatcagaaacacacagaagctgatgccaagtggatcatttgaagaaggaaacttcattggaatgaattttctctttatattgactacttacatgataactgtccagtcagtattcactcatcagacaagctttcttggatagaagcacagagtcttggattgagaaatcagaattcagagtagctaccattcttaggatctgagggtaggaatcagccagaagcaagaggctccaattcttccttcacatagactccaccaaactttaggtaaggcagaaaaactgaagagtctcagctctttgttgcctaccaaggtaagacagtttgaagtatgagttgaaccacgataactactaaaatttaaaaactagaatgcttgggctggagagatagtttagtatttaaagtgctttgagttctcctatacccatgtaaaggccaggtgggtatggctgctggttatctcagactgggaagacagaatagccagattagctatatccatgggttctggatttttatcaagagaccttgcctcaatgaataaggtaggagagcaatggaggacggttcccagcatcaaccttagaccgttacacaattgcatacacacactcaaacccatgcagacaccaatacacacatgtacatcatacacagatgtgacaagaaaatagaaatcagacttctttattagaatataacacatttctgtagaataggaaagtgcatctatgtttaggcaagaaaaaaaggggaaatgtaactgttactcaagcaggagtcaacatttttcccataaacagttatttttagctcatttgatttgttgcagcttacacaactcactattgtagatgcaaaagcatggatatagctgtagcaaaaaaaataattttacaaaaaaagtcactgggtccaattaagcctgtaggccatattctgctcacctttgttcaaaagaaaatatagtcattgagacccaccccaagacagccgagatactggaatcagcagagaaagatttcagagtagctattatcaagacataaaagaaaaagtaaaccatgtctgcaatgatggaacaaatcagtagttctagatccattcatattaccagtcacattaagcataaatagactgaacatttctggcaagaagcagattatagagtacattaaaaagcaagacccaaggccagacaaggtgatgcatgtagttttaataccagcactcaggaggcagagtcaagtggctctctgaattcaaggccaacctagtctacgtattgggttccagggcagtcaggtatacatagtgagaccttatcttaaaggaagaaaaaaataaggtataggtagttacaagccacccaatatggatattgggaactgaactgaatccttcggaagagctggacaaactcttaactgctgagtcatctctccagcctcaagataattttaatatgacaaaatgagatttaaagtgtaatgctatccacaagtaaaggaatgttggggtgacaataataatatgaaaaaagtagacttagttaacatagataacaagacatattttaagagctgggaatatggtaggacacttccttagcatgtgctaagccctggttcaataccagtactgaaaaaaaaggatgtgttttaaaatgataagggtcaatttattatgaagacattaacatttatgaatgtatatatgttcaagtacagagctacaaaaatggaagaaaattatgaagattaaagaaagtatataaacccacaataattctgcttgggaattttaattcccatcttggtaattggtagaactgcgagaaaaattcagtgagcatataaaaggtcttaacattaccagtcacccttaatctaattacagtttacagagtaataaattcattgactacagagtacccattattaccaaagggtaataaaggtaaagaccttattctttactggactgtaaaacaagtcttattaatttgaattttgattgtattctctaatcagagtgaaattaaattgcgaattgtaactataagacatagaaaaagcctcagatatttgaaaattaacacattcctaagttactcatgagtcaggaaaaaacacaaaaattagaaaagataatgtaagatttgtgggatatgcacaaaatatcacttagaaggaaaattaacagctttaagtaaaattttaaaacaataaaacatggccaggtggcagtatcacacaccttcttctaccacacccacctggcattttatgtgagcttcggggaatctgaactcttatcctcattgcttacctgcatggcaaatgtggcaaacagttaaggaaaacgtaatggatacttcatgaaaggaatatatttgaatcataacataggaattagtgaaatgtagattataagcacactgaaatgcctctgtacctccactggaatgatcaaaattaaaaactgataataagggctgggcttttttgcttagtggtagagtgctggcctgacatgtgtgatactataggtttgattcccaaacaaaaatccctgacaacagctgggcagtgatggcgcacgcctttactcccagcacttgggaggcagaggcaggtggatttctgatttcgaggccagcctggtctacagagtgagttccaggacagccaggactacacagagaaaccctgtctcgaaaaaccaaaaaaaaaaaaaaaaaatccctgacaacaccaaatgttgctgataatattgagtaggggtggcaagaaagatgccagggaacttcccattgttgtgtttgtcttatgtcttggtaggagtgtctgttacacagctgcatacacttagcaaaagtcattagatggtacacttgatttttatacacctcagtgagtttaagttttaacttaaaatgaaaataaaaatttcagcattaaataatgacatgaatgctaaagtgtttgtggattgtcttagggtttctgttgctaaaatgaaaccccacgaccaaaaagaaacttggggaagaaggtgtttatttagttcatatccacacatctatcatcaaaggaagctaggacagaaactgagacagggcaagaacctggaggcaggagctgattcagaggccttgagtgggtgctgtttattggcttgctcctcctggcttgctcagcctgctgcttccttatagaacccagaaccaccagcccaggaatgaatgacacaacctacaatgggctggtccttccccatcaatcactaattaagaaaatgcccttctctggatcttagggaggtttttttggtttttggttttgttttttgtttgtttgttttttattttttgagacagggtttctctgtgtagccctggctgtcctggaactcactctgtagaccaggctggcctcaaactcagaaatccgccttcctctgcctcccaagtgctgggattaaaggcgtgggccaccacgcccagctgggaggtattttcttaatgagttccctcctctcagatgactctagcttgaatcaagctgacattaaaactagccaggacaggaatgaagtgatttttgtgatgcattaaaaatgtataagaaggctgaagagatggctcagcagttaagagcactggctgctcttccaaaggtcctgagttcaaattccagcaaccacatggtggctcacaaccacccgtaatgagatctgacgccctcttttggtgtgtctgaagacagctacaatgtacttagatataataataaaataaaatcttttttttaaaaaatgtataagactctaagttcaacctccaaaattaaaggaagataatctgattgattgattgattgattgatgggtgaacactgtgctcagttttttttccagtttattttcacttattcttcccacaccccatcagcatagtgatcttttcttcgggctttaagaagctatattttcattcttcccattgccaactcccttgtataggtgaggcagcactttttcagcctggcagttcctgtgaatggacttttgggtcattatagacttctcttctgggaaatgatggcatactggaaaacactgtacagcacatgtgttgtacctaacctatttttaatttctgaacacttttatcatgtttcctcgttgtatatgattctcttgtgggatttctctaaaatattttctgctttctctagggacagaattggagtctatatgatactgattctctgagcctccaatcctgccctgaagagcctctggggttggagtatggagtctacatggtctctctacaaagggagtctggaggcaggagttctgtggagggcagggcaggttgacagactccagtttaggaggaagcagtctagttaaccctcagaggccagaaaagatgagcttcacatagaggaagtttgctaagtatacctttcttgatagtttgtaggtctcttacggtctttgttggagatttcttccttttgggatgtctgcacttaaatttcttagggtgacgggccaggttgcaaatacacttaaacagttagcctctagcagaaagggcatggctctccactgagacaaatcatattagtcattattttcttgctgtgaagagataccatgactcttacacagaaaagcatctaattgggagcttgcttgcagtttcagaatcttagtccattattatggtggcaggaagcatggctgcaggcatgtgtagtgctgaaaaagtagttaaaagctacatcctgatctatgggccaagtgagactaggaggccttgcctgggctttttaaacctaaaagcctacctacccccagctacaaactccctccaataaggccatatcttccaacaattacacctcataatccctctcaagtagtatcacttcctggtgactaagcattcaaatatatgagcccatgaaagctattcttatataaagcaacacacaagagagttactcctttgtggggggaggatgagaacctatttcacaagttccttaggaatgctgggttttagctaatcaccagaaatctgtctataatccattctgagctcatttctaggcatagactacctaagacctaacatatgtatgtgtaccatgtctgagaatagtgcctgtggagatccaaaaaagaaggcataggatcccctgaagctggagttaatagatacttataatctaccatatgggtgctggaaattgagtctgggtcttttttttccattttgtattaggtatttagctcatttacatttccaatgctataccaaaagtcccccatacccacccacccccaatcccctacccacccgagtctgggtcttctgcaagagcaacaagtactgttaccctaagctttccttctgtccctgtcaaaggcttttaaaatctgcatttgctctgtattaaccacatctttatattctttctcaagcattcatagtgactagtgctagttcaagtatcagaaaatttagcccagttcatgttatttttttcttttcacttcattttattttgtatatgcatacatgcatgtgtatcacactaagtgttttacctgctgagccattgcactcgctttcaaatcttgtatctgcaaaagcagagatcctcttttgtgtttcaagtttactgcctgtaatgtccaattccaatatgctcattaccttggggatacttataattcatatttgcttgcatctttaatctgaccatacctcccactcatctccccagtttcaatgccatggtcatttgtttgtacttggtcaataaagcaccagctttggcgaagttcagttatctcccttgtctgctctacacacaatgaatatgattactctttaatacactccagatgaacctcatgttcacctttctttgacaggtatactccagttccccgtgtctctatttgttccatctcctttggccatgtctgtctatacagcactatgacaaatatatgaggaaaacttaaaggaggattgtattttggctcactttccaaagtctcccttcatagtcagttggctccattgtttctggacctgtggtgatagaagattgttagagaagctcttcttcacagtggccaggaggcaggggaaagctccgagtagaggacaaaatacatctctccaagacatgccctcagtgacctaattcttctagctagatcatacctaataacatttcttctgcctcccagtaatgttgtcaagttatgaatccatcagagctctcatagttcagtcacctctcaggaattggatccatcagctcagggtcaaggctttggccaaagagtgaagaagtaaagttggggaaaagggatacttcctatcatttataacaggctgtcatacccactcttgtctggtaactgctgtgttagtttccagagagcagggaaacagtccaaagagaatgcccacagactagcattgcaccctcatgctctcaaacattctcccttatgatgtgagagacccagctctgcactcttgcttctgtttcaagatgtgtctctagagctctctgatatcaggccctcctcccagttccctagaaatctgttcctacttcttccacctcagtggcactgtttctggctcctgctcccttctagcttcaccacttcccttttcctttccagtgacactatgtctctctccatactttcctaagctctttgctgccaaagctagggcatgctacacagtaagggttcatcaataatgaccttcatattgttcaatacagttccagttttgctgatccttttctaggacatttcagcaccatttgatctaatgtctatagaagtcagtgcctttctgagtatctgcatgaatctctaccttctcatggagcctaccatgactgggcttcttttcctccaaccatagcttttgtcattttttaacactatgtagctgacagtgcttacttggactatcagcccattgtagcatatgctactttaaggcagagctgtccacttgattcatgatatgtcccaagcatttagctagaacaatggctggtgtctaatgtagtcattcatctgctgcatcagggtcaggaaagtaacaagggcttcctggatccaccctgacacatccctgtttgataaagaaaagaatctgttttaggtccttgacacacacacacacacacacacacacacacacacacacacacacacacacacacacaccccgcgctgtcttctgttcctggtatcacacatatagcttgtggggtttttttctttttttttttttggtttttcgagacagggtttctctgtctagctctggctgtcctggaactcactttgtagaccaggctggcctcgaactcagaaatcctcctgcctctgcctcccgagtgctgggattaaaggtgtgcgccgccacacccggctttttttttttaattatttgtttatttatttattatatgtaagtacactgtggctgtcttcagacactccagaagatggcatcagatttcgttatgggtggttgtgagccaccatgtggttgctgggatttgaactcaggaccgttggaagagcaggtcggggctcttaactactgagccatctcaccagccccggggtttttttcaagtctattcaaggatcacttctactatgaccctctctggccacgttcttctaggtcaaagtcttctttctccaccccttcactgccaatcctgatatttgtcgacatctgctacaagctgaatatttttgtttgtactctcctccccatactacagtctaagccccatgaagacagaggattggagtatacagatactgctacatatctctagtacctagactcagacataactacttagcagatgaatagttctgcattgggactttgccctaaggtttttgtcttaaaataagctggacagaataaaacagcctgcactgctattagttcatcaacttttgggtggccaactattcatgagctaatcaaacctgtcagaggtgcacagaaaagggaaaatatgtgagtttggggttattttggggggagttgtagtcacccaaagcaaaataaatcaatgagaatctaagtagcatccacacattcttcctccttttaaatataagtgtatgatttaacagcacagtttctcagttcagctttgcaaaacaagagacatgaattttaaaggctatcaggtgcctgtgcaatctgtaacttcatatttgtttaacaacatttgtgttttgccaacagatgtaccatttaaagtacccatgagaatagcctctgtggttttctgtttcactagagggaactttaggaaatgatgaatgcacagagactggcactacccccagctccaatactagggaatttgccactctgcctgggttctggctaacccctgtaggcatttcttactgccccttcctggcacattgttctgccttccttcatgtttaatgtgttccttgagcacaaaagtgcacaggtgtcttcccttcgcttcccctatataggagggcccgtgtgttgaggtacccaacaactagtcaatgaaaagaaagtatttgatagagactcccaggatgtctaagggaaaaaggaaaggcagaaattctgtctcattccttaaaatctggccattgcatctaagtaagtaagtatgttacctgtgcttggtttccaggctcaatcacaaggcttcagctgctttccttcatttgtaggtgactgctgtagcttggaagtgtgttttctgtggctaaatgaacttgctgagtctcagcaatttaaacacgtttagttttgttctgataaaattgaaaaggaagagtttggtattaataggtttaaactttttatagttttttagtaaagcacattttcttcgaataatgatgctgtaaggttacttcctaggagacataatgtttatacagtacaatctgaattatctttgttttgtttcttggattcactaagaaccaattcaaaagctgatttgggttttttttttttgataatatataggaagaaaaatctttaactttatcagttttttatttgttttgctttaatctatgtatatgtgtctatgtgaatatatcccacatgattgtgggtgctcacagatatcataagagagcatcagatcccttggagctggagttacagatggttatgagccatccaacatgggtgctgggaaccaaactcaggtagttcagttctataagagcagaaaatacttttaactactgagccaatcccacttgtcattttttttccagtgggttgaattatagtaattgtgatatcttagtggaaaagcaatatttcaaataaatctcacatacggtctatcattcccatcttttgttttgtttctgttcatcttgatatctcatttgtattgtaggaatgagcagacatacatgtaggcaaaacagccatacacgtaaatttttaaagaattcccttgctagacatagtagtacatgtctgtaactccagctctctaaaagctgtggcaagtggatctttgtgaattcaaagccagactggtccacatagttctaggtgagataagctgtgtagtgagaccttgtctcaaaaaatgaggggaattggctaatagaaattatgtcttattttttgttcctgtggtaaaacaccaggaacaaggcaacttataaagaaagcatttaatttggaacttatggttttaggaaggtagagtcctttctgcctctaatatgtagaacaagatgttagctttcagatgtccttgccactgtgccctgctccaccatcatgaactctaatcttctgaaactataagccaactaaacactattttattaattgcattgttcatggtgttttgtcacagcattataaaagcaactaagacagatggttcagtcattaaagcacttgctgttcttcagaggacctgagtttgattctaaacaccctgctgggtagcttacaacttcctataactcaagctagagaaaggggcaaatgatacctctggcctccatgggtacttctactcaattacacattccccacacagatacacacataattgccaggcctggtggttggcatgcctttaatcccagcaagtgggaggcagaggcaaatggatctttgtgaattagaggcagcctggtctacatagcagagctatgtagagaccctgtctccaaaaaaaagaaaagaaagaaagaggtacatgtaattaaatttttaagatatttctccattgtctacttagcctaaaaacagaatttggagttgatattgcacttatctttcatgtaccatgatatctagagataggtttcctaggccactagtagtttacaaagtaaagcccctcagtaggtgtattacctcaccaggatagtgttctagctattacacccatctttctagactagagaaagggttgggttttttgttgtttttttttttttggtgtggtgttgcatgtatatgcaaggatatctttaaacatttaagaacctaagacattttagaagaaattaccattctaatgaattaactcattaactatcatatttttagaaattgtaatcaaaaaatcttagtctaaacattgcgtagcacagtgcaataaatttcatagcagtagaaaccccaattatgacaagtttataagggctcctttctgcctatatcattaccaacatgtagtagctcaatagcatcatggtgaaagaacctaatatagtgataccagtccttgcaattggttgataactacttgtgaccttacataaaacagtcatgggccttgctgtcatcctcagcctcttgtcagtccctaaacaggcttgggtttcagcagacatcccattaggtagtcatagagaacactgaaagaaattaccaaggacttgtttgactctatggtagaaagaggctaacatgaagtatgcattttgtcagattttaccaatatttttattagcatatattaattttacaaaataatgagttttctttatgatattttcacataggtgtatgttgtatgcctgttatctctctcccccactaccttctggtttttttttcccctcctccttgtgcccttccttggcccaaaaatagtacctgataaagctttggtttggggttgtttttgttttgtactcttctgcctcttctcaactcactgcctgccctacgacccaccaggcttcttcagaacaaactgggtaaataagaccacacaaccagatgacatgtgctctgctttcagtccgccaggctggacactcttctgcctatccctacagtaccaatatttagggagctgccaagctgtgccatactgtccttctctttttcccatctttcccttgagcccttctaccactgtcctgaaccaaacaccctcttgagggttcctgtgaccttgtaagctttcctatagatacctggctttcacacaatctctgtagtcagattgatctctcccctgctttaaacccaaggcccctctagtgtgaatcttgcttttctttctagactcttccctattcaggttagagtcccttttctctgtacacccacacctcatgccaaatttgcccctcttccaacagcagctggttgattgtttcctatcctgtgtactttagaaacagaacatttttacacccatagcttctatctctttgtctcagcccctctcatcctgaaggtgactatattgaacatgttgacaaccttcctagtgtcagactttccatctccttgaccacctccattccagtgacctcaggcacacatcctcatactcaaggactggactttgtcataactaaaacctgttccacccatagagcctaatgcagacctcatgatgacaaggatttcctgtctgtccggcttgtggtgtctactgctcttccatgtccctgggacttcatttgtattctctcctctcatgaatcacacttatcaccataaaaatgtgttttagaatttcctgcttagctatgcaaaccttctttagcctctgtctaatctctactctgtccccttttaatcaaactctcccagcattctctgttcatggacccttccctcacctcctataattgggtccctcacctcctgtaatcaactttataaagacatataaacactcctgtgttccatgaattggccttatcagtctccagtggaccttcacattgttatggccagtaacaagtcgtctttttttgacattatgttcagttctttagaaaactgttatcttgtacctcttctgtgactccacagtctccaggtaacattttgtgtttggagaacttctcgctctaccttaggagtttgagtggaggccaaataacttctataatcactgaaaataccagttgcttgtttacgtagcttctcttcaattaacatagcagctggtgaaccacatccctagagttagctctggctcactgcctgatttgatttggtttatttgtgacagtcttgctacatagcccagattggcctctaacctctgatcttgctgcctcaatctccagagtgctggaattatagttatgtgtcaccatacctggcctgccactgcttgttttttgcatataaaattctactagaactcagctcatccatttctttatgcattgtttttgtctatgtctctgctacagctcataagttgaatgattataataaagactgtgtagctatcaaaatggaaaaaaaaaaaagaactcctgtgcaaggatgtggatcaggctctgccatcgttccctcacctgataagaggagtgggcaggctgccagaaagatgagctccaaagccaaagttctgcccagtgtttcctgcaagcagagttgcagaggcaaggacagctgccccagatcagattggcaaaaggacttagagtgtgtctacttactgagtgattttagggttagggttaaagagactcttgtctttaaaataccaagaagagggttggggagatggcttagcagttaagagagcttgctgctcttgcagaggacaagacttcaatttatagcactcacattaggcagattttgtctcctgtaaccccagctccagagaatccagttccagccacacatgcacaaacccaaacatgggcatatgtataaatacatttgttattatttattatctttaatctttttttttacagtccagtttttatccccctcccgatcctccttcctacagttcctcatcccattcctcctcccccgtctccaagaggatgtccctaccccatcaggcctccccactccctggggcctcaagtcttgagggttaggtgcatcttctctcactgaggccagaccaggagtcctctgctgtatatgtgttggggtcctcatatcagctgctgtatgctgcctggtcagtggctcagtgtcttgagagatctctggagtccaggttagttgagactgctggtcttcctatggggctaccctcctcctgaacttcttccagcctctcccttacaggagaccctgacttcagttcattggttgggtgtaagaatctgcatctgagctgggtgtggtggctcatgcctttaatcccagcactcaggaggcagaggcaggcggatttctgagttcgaggccagcctggtctacagagtgagttccaggacagccagggctacacagagagaccctatctcgaaaaaaaaatatctgcatctgtctcagtctgatgctttttgggcctcttagagggcagccatgctaggctcctgtctgtaagcacaccatagtatcagtaatagtgtcaggccttggagcttcccctagagatggatccaaatttgggcgggtcactggacctccttttcctcagtctctgaactacaagaagaggaggagaaacctgttagaacacagaatcaaaggcccaaaggaaagtgaggaaacagaagttgcttataatataggcttctcaaaagctagaagagaatatcaggtgccctgctctgtcactttcttctgcctttctcccttgaaacatggtttatcaatgagcttcctgaatctgaatctcaaaagaaggaatgaatgagtgagtgaatgaatgaatgaatgaatgaatggaaaatgtttgtataaacagtgattctgacattttccctcttatctcatttatgaggtcagtctgtgggaaagacaccctacctgaatcttttgcctttaccaagtttgtaatcttggcctgatttcccagtgagtcctagagtagccattttacccctgttctggagcctttctggctacttgatgagtcttccctagctcctggcatctatcttttatgtttaccaaagcttttattttggaataccaaccatatcagaaaaagcagcaacagatgctttatgcaggtagagtcttattgatggcccaagtgtaagcatgaacaagatacattgatgtttaagggacattggataatgcatgagtgagtgagatgaagcaacacataatgttcctaaaagtcttacactactggcatgtactaccataccctggttctaggatcacttctatttaaacccaccactagctactgagcattcaagaagcatttctgccaccccactttacttctatctagttccagaacatttgaagtacctctaaaggaaaagcagtctggcagcttctcagaaggttaaacataagagtaaccatgtactgtagtaatcactcctaggtttataggtagaagagaactaaaatgtatgttcacataaaacttgtatgtgaatatttcatagaaacactattcctaatagccagtgtaatggataatcagggaattttttaaattgtatatagatggtttgtttatgtttgtgtaggtgtgcaggtctgtgtagccctgagtacatgtgtagaagctagaagagaatatcaggtgtcctgctctgtcactttcttctgcctttctcagttgaaacatggtttatcaatgagcttcctgaatctgtatacctccactcccatcaccaacatgcaaaggcaagcagatgtctatgagttcaaggacagcctgggctacagaattccaagacagccaagactatataaaggaaccctgtcttttaaaaaaatcaaacaaacaggaataaaattctaatccatgatactctaaagacattatgctttatgaaagaaaagagccatgagtcacaaagggccacaaaatttatgatgccactgtgaataatgaaatacataataggccaattcagtaacagaaaaagataagtagttgtcaaggactgaagggaattagaaagttagcaactacctatgaatacagggtttcctttgagagttaccaaaatatgcaggagctagatagtagtaatgattgctagatgcaactaatggtaagctttatgcttgtgtttattttaccacagtttttgtcataatgaactaccctcaggatatttagctaataatctataacctgaccaaaacccctagttgtgaagcttcttgaactaaattcctttctgggggccctgcaatggtagtagatacctattgtatcagcacttgggaggcagaagcaggaggatcataaattgcggttaacctgtctttaaagcatagcaagaatctgttttttttttttaaaaaaaaatgtgactgggaatatggctcaattagtagagtatttttcctggcatgtataaagtcctgattttaatcttcagcaccatataaataggacacggtggcatacacctgtatcccagcactcaggagatgaagtcaagaagatcaaaaattcaagatcatcatgttatggatatatattcacacgtgcaaacatacataaaaaatatagtttagtctgagtctagtggcacaggatggtaatcccagctactctgaaggctgagacaaaagaattacacatcaaggcctgtctgggctacagaaacctgcgttgaaaactttttgtaagaccctatctcaacataaaaattttttaaaagagctaagaatttagctactggtggagcacttgcccatcacaaataaagcctgagttcaatccccaacactgcaaaaaataaatgaatatagtatacaattcaatggcatcaagtatgtttgcagtgttgtggaaccatcatatatagcaattcccaaacattttcatctcccaccactctgggggggggggcagactctcatatccatttgtaatcattccttattacccacagccctggcaaatgactttctgttactatggatttgcttgttccaagacagggtttctctgtgtagccctggctgtcctggaactcactctgtagatgtcccaagtgctgggattaaaggtgtgctccactactgcccggccagaatgttttcttgagactcgtccatgttatactgtatcagaattcctttctgttttaacgttaaacaacatttcgttgtcgtgagaggtttttctccattcatccatcagtagacacttggattgctcccaccttttgattcttaggggtcagggagctgcaaacattagcatataagtatctgattgcaggcctattgtcagttttttggaatctgtacttcaaaatggaattgctaggccataggaactttatatgtaacattttggcctcagagttgtcaagactttttcactacagaactttttgtgttgttttgttacagttttgttgatttgaggcagcccagtctcaaacccactgtgtagtcaaggattgccttgaacttctagtcattctgtctctgcctcccaagtgctaggattacatacaggtgcatgtcatcactcataggagtgggattttattgttgttgtttcttaactgacatggtggatgtgacaagctggatgtgatgccacacccttgaaacccccagcactggggaggtgaagaaaggatgatccctgggactcagtgaccagccagagtagcctaactgatgagttccaggccagtaagagaccccagaggaggtaggtggcatccttgaagatgacactcaaaattgtcttctggctttcacattcatgtgctaatgcacacacacatacaccccaacacatacaagcattttaaaaaatggctgcaaagctggacatggtatatacctgtaatcccagcacttggggggcgagtgggactcaagagttccaggctaacctggactttgtgagaccctatcttgcacattgcaactatcccttctcaccataaccagcctgctcgctttctcatgtagcttcaaaagatcctggatgtcatttgctcctgggcaggcaagttcttggagcccagactaggctacctttggcagtgctttttttcttaaacatgaaaactgtagctttatatttgttttatccccatgttggagcttcaccaaatacagtgtagtgttgtggttaggcattatggcagtttgagctactaaaagaaagtgcttcatcaaggtttccaggtgtttctttttgttatgcttaaaaaaaaaaaaatcaatctgtgcagacctttaatcccagcacttggaagacaaaggtgaatctgtgtgagttcaaagccagcctggtctacgtatttcattccaggacagcaagagctacataatgagaccctgtttgggaaaacaaaactaacaagaaaaatgactaactgggtatggatatgtagtgctagctagcctagaattcatcatgtatgtaatatgcagcctgatctagtattgttttcttgtaacacaaagttactctttcttaaaagcttgcttattacttcttgaaaatactactcttagagctaaggatatgactcagtggtagagcactgcctagcataaccataaaaaaaacttccatcgggtggtgtacactttaatcccagcacttggaagacataggcaaggggatttctgtgtgttagtagccagcctgatctacatagtgagttccagaaccaccaggactgcataataaagagactctgtttcaaaagattttaattgccataaactagtagggtttctgatgatattgatgtcatttcctcttttaaaacatgttataacattgacactatacatatcccttccacccctgaatccccttgagagttggaagtcatcttgatgttcaggtataaatatttgaagctgactttcctaatagcacacagcataactacaacagtccggaagtttagtaataagctaatgtaaagcattattcacatttccccaaatgtctcattaatgctctgtgtgtctttaaaactagaatccagtccaggattgtgtgttaggttcgaatgttctttctcctcagtcttcttattctttagtctgtatagtccttccttccttgtcttctctacgatatttatttggttcagcatttttaggtgggcactgcggtctgcccacaattaacttagttctgccttgttgattactctgctatacagatctcaaattcattactgcctacatacttggccatgcctaggctattgctaaaagtttttcttgactccccctcccccacccactgtttttgtactcccatccctagctttactggcactagaggatgccccagaatcagagtcaccaattttatctttgagctggtttagtgtatatactgcccctagaatattactgttgactttggaatatatcccaccacagaagtactatgatcaaaagttagtcttttttgtatagtaacagttaagctcctttgttcctgtttgcatgcattatattatagttttgttactttttagttgtgtaagtatttatgtgattcattagtcaaaaatatattccgagaagtgttcaacaagagctcttacctagttttcacctactctagactttgttaattttctaggctagcctacaatcctgtacacctgatccatatgggaaatgtgtctgcagtttgttttgctttgatttgatttgttttgttttgttttgttttgtttgttacatcaaaaaagatcatgatactcatctagctgcacaaccttccaatatgtaggcatcccgtagttgattctccaagtctccttggtcatgaggacctgagaggcctgcattcttaactactgaaaataaaactgtaatgaaaattattttatgccttggttgttagattttctagaaggtgttcctttgctcatatagtttatatttgatggtggttaaaatatttaagaatacaagtgagaattccaaagccagcctgccttgttactctagtagttttctcaaactcaagttcagaatcaggggagcagccctggtgttcaaaaggggcctgtgaagttatatgcacatgatgggtacctgttggcctttgttttgccagctttgctggtgagtatccccttcttttcttctgtcactgagagcttctgaataagccagtctgaagattgaactgtgaacagaccacaggcttccagatgcacatcatagccctaacctaattcttctcttagttttagaccaataggcagctgctacttctttccaaaccttccttagtctggcctgtagctcagaggggcagtgcagtgtgaccagattctagtcagagaaaggctcactgtgtcgcactacagtggtaattaaaagcatccaagacaggctttgaaccctaaagtacatgaaggaaccccaaaaaagaaccaaaacccatagaaggaggctatttctgtctacaagaaagaataggcaggtgtccttggatatggtagttgctaatggcctatacactgttctattacacctttctgctaaggatagggtttttggttttggttttggttttgttccccaccctccagtttggtttagttttggttttggcatttagggttttttgggggggagtaatatcttgtggtaaagacccatgtgacccaagataccttttttctcatactggaaccctaggcagcagttgctatttccctgagttagcaatagttttacagtattttgaggccttttgtccataattctcacggaatgcctcagggatgagattagctgctgttgggatgaggaaattgggttacaccgctgaaatctcttgctggggcccttgttttgaattggaaagtcaggaggctggaacgaaggctcacaagttaacagtgccagctgctcttccagaagccctggattcagtcccaccaatccatggcgggtcacaaccatctgtaacttcagtcccaaggggtccgatgccctcttctggctttgccctattattttatttatcttatgtgtttttgtcttgtcatgtggcaagcccagggggccattgggtgcaacttataaactgacttctgtatgttaagaagccaaccatacagtgcttacattccagaaaaaaaatgtgccactttaacagcactagaactagggtttagagaagtatgataaaggtcaaatatgtttgaccaatatcaccagcaacctaaagctgttaagaaatctttgggccccagcttgacccaaggatacagtatcctagggaagttaccaaaatcagagatagtatgcagcagccaggggtctcatgtgtggcactcaagctcacctatactcactactgtgcagacagctgtgttctctgtaatacttacatatttgtttaatacttcagggaggaaaagtcagaagaccaggatctccagggcctcagagacaagccactgaagtttaagaaggcgaagaaagacaagaaggaggacaaagaaggcaagcatgagccactacaaccttcagcccaccattctgcagagccagcagaggcaggcaaagcagaaacatcagaaagctcaggctctgccccagcagtgccagaagcctcggcttcccccaaacagcggcgctccattatccgtgaccggggacctatgtatgatgaccccaccttgcctgaaggttggacacgaaagcttaaacaaaggaagtctggccgatctgctggaaagtatgatgtatatttgatcaagtaagtaagagcaagtcttgtgtctatagaacaagaaggccaggtgggtaggaaggctaggatggaaaagctttattgcactgaaatggcttcccaaaaaggctggacaccatgccttggttaaaatggaggaatgttttggtggtggattaggtctgggtaccaaccaaagatattcagtctagcccaatgacccccaagtactagacctcactccttcagtttaaggattgtggaaaagccagggagtacagaggagtgggcttgaaggccggcaggtcctctgttttcagatccagctgttttggcttctgagcaagctgtaacatggtttctacccatgcatctggcccggttgtgttccagtttgttccttgttcacttacaatgtcttagaagaaagcttgtcagcatattttctatctcagtctctatgttgtcaaaaagcttctgactattgtttgtgtctctctgtttgtttctacagtccccagggaaaagcttttcgctctaaagtagaattgattgcatactttgaaaaggtgggagacacctccttggaccctaatgattttgacttcacggtaactgggagagggagcccctccaggagagagcagaaaccacctaagaagcccaaatctcccaaagctccaggaactggcaggggtcggggacgccccaaagggagcggcactgggagaccaaaggcagcagcatcagaaggtgttcaggtgaaaagggtcctggagaagagccctgggaaacttgttgtcaagatgcctttccaagcatcgcctgggggtaagggtgagggaggtggggctaccacatctgcccaggtcatggtgatcaaacgccctggcagaaagcgaaaagctgaagctgacccccaggccattcctaagaaacggggtagaaagcctgggagtgtggtggcagctgctgcagctgaggccaaaaagaaagccgtgaaggagtcttccatacggtctgtgcatgagactgtgctccccatcaagaagcgcaagacccgggagacggtcagcatcgaggtcaaggaagtggtgaagcccctgctggtgtccacccttggtgagaaaagcgggaagggactgaagacctgcaagagccctgggcgtaaaagcaaggagagcagccccaaggggcgcagcagcagtgcctcctccccacctaagaaggagcaccatcatcaccaccatcactcagagtccacaaaggcccccatgccactgctcccatccccacccccacctgagcctgagagctctgaggaccccatcagcccccctgagcctcaggacttgagcagcagcatctgcaaagaagagaagatgccccgaggaggctcactggaaagcgatggctgccccaaggagccagctaagactcagcctatggtcgccaccactaccacagttgcagaaaagtacaaacaccgaggggagggagagcgcaaagacattgtttcatcttccatgccaaggccaaacagagaggagcctgtggacagccggacgcccgtgaccgagagagttagctgactttacatagagcggattgcaaagcaaaccaacaagaataaaggcagctgttgtctcttctccttatgggtagggctctgacaaagcttcccgattaactgaaataaaaaatatttttttttctttcagtaaacttagagtttcgtggcttcggggtgggagtagttggagcattgggatgtttttcttaccgacaagcacagtcaggttgaagacctaaccagggccagaagtagctttgcacttttctaaactaggctccttcaacaaggcttgctgcagatactactgaccagacaagctgttgaccaggcactccccccaacaatatcctccctcttccccccccccacccccgccccgtgtgctcgttagggcaattgagaggacactcccatttttggtgccattgatgccctgtccataatagcttccctgacttttacaccaccccaactcccaatctgaaggactgggaggtgtgatgcaggagaaactatgggactcttgggagaagactatggagttggccagtgattaaggcccagtaattccaactgtggtagcacagatctggctccacatcaacccaatccaaaactgacaaggatattttgcaaaaaaagaaagtggcacctgtctgatccagctctgacatggctagaggtgagtcctaaactgatggcttataaactagcctgagccacagaagagtatggcccagagtgaagtgtcatcatctgttcacaaggcatgctcccctagaagataatgctaaagaggtgccatggaggcagcaggacaaagtacaggcaggctaggtggagtcaagccaggcctagtgccacagaacaagagagcagtctgactagtaattaagagggaagaaaggaaaatattcttccaattactttccagttctcctttagggacagcttagaattatttgcactattgagtcttcatgttcccacttcaaaacaaacagatgctctgaaagcaaactggcttgaaatggtgacactgtcccacaagccaccagacatggcagtgttcagaactacctgtatctgtatatacctgcgcttgttttaaagtgggctcagcacataggattcccaagaagctccgaaactctaagtgtttgctgcaattttataaggacttcctgattgctttctctctcgtccttccatttcttccttccttccatttcatgctttcatttcttcccctagcttctagttgtttcttctgttccaggcagctgcagtgctgaaccacatggttacctaacagcagtcagctgcagccctaggattcttcctgccctttaacttcccattgccagtgccaggtatcatatttaaccttgagcaagagctgggctcttttgagccctccctaacctctgtgaagaagaacaagaaggtaggaagctcttgctcttgctaagaaaaatgtcaaaaggctttcagaccttaaacaatgagccttttcaccttttactctagaaaagtggactagaaaatctgggtcacattgggtagctgaaggagatacagaggcccctatggcctgccagagtcgttgcatggcccaacaggggctccatgcccactacccttgaccctactcagaaatctaatgtcatacttagtgtgggcaggggacctgtcaggacagatgcagacctaagcagggagtgacaccagggcccttggcccttcttctgacaaacatacacatcccaagtctttttctagtggaattcttaacctcttgctcactggggactgggaagcatcagcacatcccatatttcaaactctgctccataagtacagtggtgaattttatagacttgactttgctgtggggttttaattggtcagttttaatttgggatcccaaagttttaacctccattcaggaagtccttatctagctgcatatcttcatcatattggtatatccttttctgtgtttacagagatgtctcatatctatcgaaatctgtctgagaagtaccttatcaaagtagcaaatgagacagcagtcttatgcttccagaaacacccacaggcacgtcccatgtgagctgctgccatgaactgtcgagtgtgtattgtcttgtgtattttcgttaacgttccccagcttccttcctgcggtgtaatcatggaagagtgaaacatcatagaaatcgtctagcacttcctggccagtccttagtgatcaggaaccgtagttgacagttccaattgatagcttaagataaaaccatgtttgtctcttatggaatggttagaactaagtgagagatcttgccccattctgtttgccgaatcatagttggacttttagtgtatttgtatccatttccttgtgctataaaagcaaaccctgcaaccagctttctgtcaggcagtccttttgcctgctctgcttttgatcctcttagtcttgcttctggttcctccctggagagggaggaggggtcagaagaggaattctggaggatccaggatatgtccttctgaactcctgcttcttccagtgacaaaaggcccctactgccccaccccaacctgccccatgcactcctctaggacacctttccatacttttcacaacacctagccaggttgacaccaagttgtttattgtggtctgcttggaattttacctgttaggcttacttagtccaatcaaatggactccaagttgggtatccctcatctttggaagacaacctaggctgattagatatttacttttgggattgcagcactttgggtgccgtttttcttttacttgggttttatctgcagctccctcaccaccaccaccaccccccacttacctgtatgtagaactgatttcaaaactgcaggtggtggtaactgcagcttcttagggttttcttcacttcttgcttctttccccattccctcatccacaaataagggcatcacaagtcagtctcctttaagcaggcagctttggtggggtttttcccctggaagccagggaccctgtcaggctgcctctgccttgtggtcaggttgacaggaggttggagggaaaagccttaagtcatgggattctcaccagctgtgtctggctcagacctggaatgtgacctttattttgttgtatttgaacattgtaaagtgtgggtggtaccttaaactgaatatgtgaagaatccagaaactgaccaacagctttcagatacctggggctaggtcactaaggtcacatccagtcttccctaccctgttctagttgttagctactacctctcccagatagattgctgtatatcctccaactatgatcatcctggcccaagcttgcctgttcttgagtctgtcttaaccagtggaactgctgcccttggtgtgcagtgagttgaggactcttggtcacagccaggctctagtagtacagctcctttctgctggtgctgtatttccatatcaaaaggcacaggggagatctagaaatgccatctcccccagtccatcagtgccaaacaagcccatgatcccagcatgggtacagacaactctgttcagtgctatcacaacagactagaggccatgaacattggacgtgggaaccagagcaacccgaattgctgctgctttattcagctttccgttgctctgacaatgataaaacaaggcagtaacttaaaacagactgccaggtttggcagagaaaggaaattccttagctgacagcacctctggattttaaataggttgtaataagtggctcaaacccatccaggaaaaagcaaaagggttagaactgaccagatgagaccagcctgatttcatgcagcccaaatggagtccagctgtctgaactctgcagcacttctctactacagtctcctagagcattccagccaggctcttcaggctgaggagacatcacaggtgccagttcttcaagaagacttttgtgcatcagttcatagcctatatctttgcccaagattgtagattcaggttaacactacagattctagggcagatgactgagactcagaaaaaaagcccctgtggactgtggtatagcgaagtacaaaaactgaagggggctagggcagatgccgcatgcctcatgccagagccaagccctctgctccatccacatccttttctggctccttcttcctgctctctgcttcagtgaaccagccccactctgaagagatttgttgattctctccatttttatgtctttctcttttaggtactatatagaaaaggcttagtctaattgttataaattgctagaatactgcctcccccagggtctaaaaatatatgctaaaggggaaaacttgaacactgaaaccagttctgaacaatttagaaggaaaaccttgaaaacatttaacaaaaaattatattttaatgtttatgaataagaggaggcttttgaaaaaatgttgatctataaatacttactttaggcctgaggtgtctaatgagtgaactgagcaatgggaactcaaggctgaagcctcctgcatcagaggaggtagaaccaggagcctcttgagatttgaggtgttttagcattggaaagccactctttgggtagctggccccagaaactacttctgaccttgtcatttggaatggaggttagtggtctgccagatgccaaagctgcatgagaccagctcttggtttatcaatttgaacactcagtaacctagaaggcccagcacaaagtgtctgctctcttcttaactgagcctgccccagcactactgcacaaattagggagggtctacttcctacagagcatccctccctgggccccctcccatcctttgtactctacctacctgaccttcaggatcttggcacatacgaaatggctgtgtagcaagcactttggcatgccctcctaaacttaccccagagcctctccctgcctccttaagccagtctgcctgtcttctggggaggtgttagagcccatagaatggagaggagaaagaaaagaggaagaggcaggcaggtagtaaaaaggctctgggaggaaagacagcctcctaggctttgcacaagcaggactcagccccttgtgggaactaagtgccatcttggagtttaagaacatttggacaagttgcaaatgacctttgctccttgctcctctcaccttttatggggccctgcttagcactgaaagcaaatgcgctgaaaaggcaaagaggtttggctcctgcccactgatagtcctttccctgcagtgtttgtgtgtcaagtggcaaagctgttcttcctggtgactctgattagatccagtaacttaagagatttgtatgcataggtctgctttgactcttctattctgggcttttgatttgtttttcagttttgcttttagttttcctatttttattttatgcaccaactagacacacaaagcagttgaatttatatatatatatatatatatatatctgtatatttcacaattataaactcattttgcttgtgacgccacacacacacaaaaagaaaaaccttttaaaattatacctgttgcttaattacaatatttctgataaccatagagtaggacaagggaaaaaatttaaaaagaaaaaaaaaaaaagaaaaaacacatctgtctgctggtcacttcttcaatccaagcagatctgtgatctttcctcgcgtctttcaaagacttccctgtgctaagtgaaggaagctccaggctgcacccaggttttgtgctttgtttctcctctgttgtgaaaggggccccaagattctgggtacaggacagttcatttcagcatggggtcaggagacaagagcactccctttacatgctgacgtacagaacttagtgggaatagcctagtccccacctctagggatggggagctagcatgcatgggggtgacccaactccctccacctttccctggccaggaagagcctgtgtacagtaagtctgacaagctttccccagttagcagggctcagagcatttaaaaaccctccaaactttgctgagtctagggactagagagaagatagaagatttggtctatctccaaggtgtgtaagctgtaccaggtagaatgccagggaccccagaaccacatccaacagcccaatgggtctcctccagaaagtagtgaagactccagaaacatccctttctcttctccctgctcccatgagtaactgcatttgcttttgtaatccttaatgagcattatctgctaaaaaaaaaaaattagctgtaacagttctttttgcaaaaggatcattcttaaataattaaaaacacccccccccaaaaaaaagtccagaaccttgttcttccaaagcagagagcattataatcagggccaaaatctgtcccacacctctaccccatctcctcatgattgctgcttctaaggccagaatacagcaaagatatttgtaggccctttgggtgactgggctacccttggagctcttggaagatgggctggggaagcctctgagaccctatcctagggccttgctctagggagtaatcagtattagtagagtgtcacaacattattccccagccggcatgagatgggggcagaagaagccaaagggttgtctccactgctacttacttggccactgacaggtaggtgaccatgtatgtccatatgcatgttttatggctgatgtgagatcagcacccaagttagcttcacctggtgacctctaaccctgcctggatggagcaggccacctggttcaatgtttctgggcagctggacaatggagtgcaaaaggcttacagaacttgaagccttttccttactttgctagcacggcctccttttccatttgatttgtcactgcttcagtcaataacagccgctccagagtcagtagttgatgaatatatgaccaaatatcaccaggactgttactcaacgtgtgccgagccctttccttgtgctgggctccctgtgtacctggacactgtaatgtgtgctgtgtttgctctccttcctcttccttccttgccctttccttgtctttctggggtttttctgttgggtttggtttggttttatttttccttttgtgttccaaacatgaggttttctctactggtcctctttaactgtggtgttgaggcttctatttgtgtaatttttggtgggtgaaaggaactttgctaagtaaatctcttctgtgtttgaaatgaagtctgtattgtaactatgtttaaagtaattgttccagagacaaatgcttctaggtacattttcattacaaacaaagcatttgaagggagggaagtggtgaataagacaagaggggcaatctgaattgatccctgcccagatcagccagaagctaccaaaagttaagcactggttttccattccaagtcaagagactgaagctgatgttttgccattttcaaagtcaaagcaaaaccagcttttccacccaatggattctttgcttctccttcccagattattactactgctgtaataatctaggagtgccaggagggaaaggagtattaacacagagctgtgctcactgagtatggaaaggcttggtctgagttttcaggaggatgacccactgtggacatggggagaagacagaagataaattagccgctccctgcctaagatacctcttaatagataagtcaaggccatggacattattgtctacaaggcatgtttcaaagacatgaccagtcaggacacttctgtcatactccatgttgccccctagtacacagtactaatctgatatctctgttcccgccatgcctgggggataaaatgatagcagagactcctttccttcaatgtgatctaattcccaacaaaatctgggcctgagataccacctgtttctatggcaaacatcctcagtaaagtgttattctcattgcagattgttccagcctaatgtaagaggaacagagcagtgttcccttggagcctcatgtggacagttctacctgtagtgaccagttggctatagtagttattagctggaacaaccagacagggtacatgccccctccaaaatccatgttgtactcccctctgccagccagggggggtgagatctgtagaatagtgcagccagtgacaagccaccttgtgtttgtcaccagctcaaaaactcatctaaggttgggagcaggcagacaaggcagagagaaagatccaggacagacctagctgggctggaggggtcttgaaaagccctctgtcgtattcaccttcagtttttgtgctttgggacaattactttagaaaataagtaggtcgttttaaaaacaaaatattgattgcttttttgtagtgttcaaaacaaaaggttctttgtgtatagccaaatgactgaaagcactgatatatttaaaaacaaaaggcaatttattaaggaaatttgtaccatttcagtaaacctgtctgaatgtacctgtatacgtttcaaaaacacaccccactgaacccctgtaacctatttattatataaagagtttgccttataaatttacataaaaatgtccgtttgtgtcttttgttgtaaaatcaagtggtttttcataaggttcttttactatttgaaaagatgggcagcacgcggtttcattttatttttgtaagttttttaatacatgtgaaagcaaagaatactcagcatgcctttctaagtgatgcgtttgcaccttttgttgggaagtactgtatcctgtgctgttagcattctcgataaatctctctgtgaaagtgactcaaggtctgggctttcattataagtcaccagtcccctccagctcacctgacagcatgatatgtttgattcagctatccctgaaccccagtagcctctctcaggataggtgtgggagggtagggaagcctatttcatatactggcatcctccttagtttgctctgtgtcaatatttttcaagcatactacaccagcattcgacaggaaggcctgacacaagtgtgcctagagcatagcttccctctcctgaccagtgtggcaggggcagctgctaggtcctggtgtgccatagtgttaacactttcctcccaactatgaggaactgcccaaagggagtccttgtgtcactggtttcctgtaagaatatgagccttctgcagccacctactccataggttgatatggcctggaggagaggataatggcatgtcacaaataattgtgagcatacctagaagctatcttgaagttctggcctcaaatgttacatgaaaggattgatgattcaacctatagacatggagaatacactgagtaccaggtgtgtaccagacactgagagtcccccgtccataaaaaggaccaaatccctgcccatagagtttaacatatatacacatgataattttggataatggagttggcacatcttaatatagactgacccatgagaaaccactggaagctcagcatatggttaacctcttgggttgttttggttttagtcagggtccaacttctactctaggctggcctggaactgagtatgtagggtgatctgcctcagcctcccaagtgctggaattacagatatgagccaccatgccaagctttgttttataataaggtctcactgtgtagctctggctgacctggaactatgcattgtaaaccaagctgcccttgaaattttagttatcttcctacctctgattctagagttctgggattacaggtatgcaccaccacatctagtttgacctcatcttgagagtggccacaattactgtggcttcaaagaagaggccccagtgggagccagccatggatcttgtgtagacctttctgaagacatactataagttccttagaggtcaggctagtgagagagaaccctttgtagttaggattgatatgacaaaaagtgtttgttggggaaactggtcaggagaagaaagctgccgctttacaagcatgctttcagctggccaaacaaggaataccaagttgctgcctgtggatcatccctgggcagtgagaagtgagaaaagtttagaggtacagaactccagcaagctcaaggtgtgttcaagagaggagctgggtttaggaagttttccccacagctgtttatgttcaatcttatcaggaatggctacagcaggggtgtatatgcaaactcaatttcagaacagaataagttcttttcaggacacctactaaacagggtttgggttttttgtttgttttgttttttgtttgtttgtttttttcaggtttggtcttgatctgaggtagggttgcactttgtatccctggctgacctggaacttaaaccatgctaacctcaaattcacagagattcacttgcctttgttttctgggtgcaggaattaaaggggtgtaccaccaagcccaacatctaaagagttctatctggcttaaggctgttggtgtatataagttcaggtgggtggacagaggctggctatgccatcttcctaacagctcttttaaagagctgggctttagtgatttgtacttgaggaagaccacctgagcagggagcactatccaagccatacagtctgtgcaggtgagtggcaatggctaatgctaagagtagtgcactcatatgaagaggacttcagagagcataatgagaaagtagtgtgcgctgagatgtgtgtcatagtgaccaaaaaggccaaagaaaaccctgaatggagaacagtagaggaataggcaagagacactcattcatgtggctaaaggtcacaacaggtggtatcaccaacaactactctagaaaggggtaggagaagctgctagaccctactatccttatggagagaagtgcaaactaagataaaagtgtgacagaaaaaggaaagggacatttagagccgaacaccatgtgtatgttaagagacataaatgtgttagttggaaagctaattagaatcctgcacaggcagattctgtgatctaacacttgctggcccagctgctggaaggttcctgggggcgtggtgggggcatggagatctagcacacaagcagtagcatggtatacactcttccagaccattctcagggcatccatccttatcaccaaatgactacagtctgccagagggccattttgttacccatatttaaccctgactgaccaacaatttggctggctctcaaactgctccccaactaaagcgagggtagcctctccgtgactttcaccaggcttggcataaactgcctttgtagaacatcgtgtaaaaacatcgtgccctttgtctctagaactggaagtcattcttcatcctgttcagccctattcagatgtttgtgtaggaccacagacctcggttctcccattagggactccctcctacgtagcagagctccttccccgcgtcaagggcggcgcgggacgcccccgtgtggcggaaggccgcggagggcaagatggcggcgggtcgagcgccgcctcttccgcccggccgggtgtcgcacgaggccggcctgaaggggaagtgagtcagtgtccgcggacccggcccgctaaggcccgcgcccgccgaggccccgagaggcctcggcccgggggcggcggcggcggccatggccggggggccgggccccggggagcctgtggttccaggcgcccagcacttcttgtacgaggtgccaccctgggttatgtgccgcttctacaaagtgatggacgccctggagcccgccgactggtgccagttcggtgggtgacggcaggccggcgtggggtggtggactcaggcttctggagctgaagcctgatgttccccatcccgcagcggccttgatcgtgcgcgaccagacagagctgcggctgtgcgagcgctccgagcagcgcacagccagtgttctgtggccctggatcaaccgcaacgcgcgcgtagctgacctcgttcacatcctcacgcacctgcagctgctgcgtgcgagggacatcatcacagcctgtgagcgagcatagccccagggaccctagggatgggaacccaagaggggtgacgggtacagagtttcctgagacagggaaccatatgggaactcccccccccccaccccttcacttagagatagagagctctgagtcacaaccctcctttccttccttgttatcccagggcaccctcctgcccccgttgtgcccccaagcaccgctgccccaaggcccagcagcatctctgcaggctctgaggccggggactggagcccccggaaattgcagtcctctgcctccaccttcctctccccaggtaaaaagaacccgggtgttgggcttgatatgcctgaggaaaaggccaccatgactgctgacatggctgtagactgctgctggtctctgcctctcactgccatctttatgaagcttttccaggctcccagacccattctgagtcagagctcctccaggttccactccctgtttccctcgggccaccactaccatcttcagccccttcctccaccaaggtaggtgtctcttaacccccagggaattttccagacaaagaggaagaaacttaacctttggtgtaccacagagcccaaatcagcacagccaggtcatctgagagacaactagtgttgaagggagctttcaacctggaccaaagggaatagatagggtcctcgcctggtccatggtctcttccagcagtcaagcccagagagcccagtgtctggcctccaaagagcccatccctccccgttttgctggcccttctgtgagatttcccaaggcacctgcaacttctctgaagaactcaggattggagagggtggttttggatgtgtgtaccgagcagtcatgagaaatactacatatgctgtgaagagactgaaggaggtaggtgtaacattggggtagacacctggaagacaatctatcagtccttatttgtctagttcctccctccatcagcccctcacttctgcagtctccagcctccccaagcaattccttcaaggaccccaagccttccatagatttgggcctggaaacaactggcaagcttggctcatgtcacctactttccctacctcttaccccaccatgcctggggctacaggaagctgacctagagtggactatggtgaaacagagcttcttaacagaggtggaacagctatcaaggtgagccttgggggtccctcctgtctaggggcacaaggtgagccacaccacggcctcatcagtctttaggactgcacaacacaagatctggctcccttgggccctcaaggcctggcctggcatgggtgagggaacatcaagtgctgcctacctagcctggcctgatgaaaagtagtagaacccagaaaattaaagaactcagactccactctttataacaggtttcgtcacccaaatatcgtagactttgctggctactgtgcagagagtggcttatactgccttgtttatggcttcttgcccaatggctccttggaggatcagctccaccttcaggtagtccttgctgatctggcacctttattggcatagccccttagcctgtgtcaggcaggacttgggcttctggctccccctcaaactcaagatttggcccagggttttctttcttcctttttactggcttgattgtttgagacaatacctcactacccagctcaggctagcctcaagctggcaattcttctgcgtcagcctgctctatgctagagttacattacactcagcttggcccaagattttccatacaattctttcctctgtcctctccccactgttcctctattgggagttattggctttgcaagcagagtagctaaaggatttagtatttagtccacatatagctcttgaggaatgaggaccagtggagacaggctgtcagactgaacccaagcttgagccatgcctgaatgtcatactcacaagccaccacatatacaggataagagcttccttctcaaactgttttgagagaggagagggagaagggcaccagcactttctgttaggtagagctgagcccatcacattttgtcttgagtcctgtgaaatgttcctagctggtatcccagctgtagagtgcttgccaaaaccttcggtatagctttagctaccacttgctcgtgaattaggtcatagacagtcttactcctcattctccagaggctcagaataaagcttgccccaagccgcacagtgacaggtgaggggaatttggggggggggggtcaaagaacagctgccctgagctgcctctgtgcttctgtctttgtcactccagacccaggcctgctccccactttcctggcctcaacgactggacattcttctgggcacagcccgggctattcagtttttacatcaggatagccccagccttatccatggagacatcaagaggtgaggaggggctcagaagagctatagaaagtcatatggccagggagacagtgaccctctgctcaatgaacagctctgttctgagtgtccctgtgatattcttcctgcccagtcctgtgaatatgggaacaggtgttgcctgggacctcagagctgagagtacttagggctatgagtacccctgcatggtgcaagtatacaaataaagccacggtggtgagcagaagccaaacaatgtgaaggggctcagggactgcgggccctcagacagctgggatgcaatgcagccactttccataagcagtacgcctctagtccagtttatcaggaccatttgggtgtaggggacagaaaaacagaaaggtagtaggacctgaactggtgccattcttccgtttgtttccaagttctaacgtgcttctggatgagagactgatgcccaagctgggagactttggcctggctcgtttcagccgctttgcgggggccaaagcaagccagagcagtactgtggcccggacttccacagttcgaggtaccctcgcctacttgcctgaggagtacatcaagacaggccgactggctgtggacaccgataccttcagctttggggtggtgagccaccagcccttctgttggcttggggagggaaaagcaccagtaagtaaagtcaggaaagcctagagaattctaggcctaaggcagaggtgagcctagtggggagctagcatagctttggccttagggatcaccctgcctcatacacctccctcttcccttgcactaaattgtggtcataatttgcatccttttgcttaagcttgcatcccataacaatgctgcccttgctgggaggtggtctgtacctgcctgttccgggactactttcccactagtcctgatccatgcccatgctacaagcctcttctacacacaatttctccctgctaaagtgatgttgtctatcccccctctaggtaatactggagacccttgctggtcagagggctgtgaggacacaaggtgcaaagaccaagtatttggtgagcctcctaaggtggagcatggagggagggaggggcagctgcagccagtgggtacagccccagagggtgggatggtacagatcctttacattgccccacaatagcctgctactgctgctgctgactcatctttaaaagtgggtgagtcccaagcagtttcttttaccttgcacggaagaacctatctttagtttgtacctagaccttgaggatagggatgtaatctcagtggtagaaccttattgcatgcaaggccctgggtcctatccccatcaaaggggaaaaagaactttgacaggttccccctctgccttggactggggatagagagggggctattccagataccccggggaccaaaccttcagtggaacttagagcagggctgagtaaaggcagtaggaagtaggcaggctgttaaagtagcagctccaagccatcctgacccctacattcctgtctaccttgctgtacactgagatagggctaaggaataagagacctaaagcttagcatctgagtacatggttttggttccaacattcaaaaatctgaggcaggaggattgccaggagttggaggccagctggggctatataacaagaccttctatcaaaaacaacaacaacaaaattagttgattatggtggcatgtacacttaggaggtagaagcaggggggtcagaaatttaaagttatcctcagtaatatagtaagttcaagaccagagtaagttacatggttcactgtctcaaacatacaaagaagctgggcagtgccagcacatgtctttaatcccagcacttgggaggcagaggcaggcggatttccgagttttggccagcctggtctacagagtgagttccagggcagccagagctacacagagaaaccctgtcttttttgttttttgttttttgttttttttaaaaacaaaaaacaaaaaaagacaagagacctgggttttagtcccatcaacacagtggtcatgggtcaaattcttgctcttcattgagcttcagtttcccatatagaaaacagactttaacacaggaacactattccagcaattcctaggcccagaacatgcttggctaatgctgggtcgtcaccttttacagagttacatctcccattgcttctccaggatgaagcctatttttgtccactgttgggcccagtgggggatttaaccaacccaacaaactgaaccagattctacccatccctccttcctttactgcgtccattagcacatcccagctcaagtactggttgttcagaccccacggaccttgctaacagactagtaggtttgttggcatctgtttcccccactgcaatgggatgtcaggactgtaaaacacggcccagagtgtttgatttgtggctgttatcagtagagccccagacagcactaggcacacagtggtgtttaatgaacctagggaaagaagaccagaggactgagtggcagtggcctggaagttttggtggaaccatgctgaactgacagtatttgttttacagaaagacctgattgaagatgaggctgaagaggctggagtgaccctgaaaagcacccagcctactctgtgggtgggtgtagccacggatgcttgggctgctccaattgctgcccagatctataagaagcacctggactccagacctgggccctgcccaccccagttgggcctggccctggctcaactagcttgctgctgcatgcaccgtcgggccaagaagaggccccccatgacccaggtagccctggggaggccagttaaccatggggacatagtggccagcaagaaaactttcgtacttgccctgcttgatagcaatagctacaaagtacctacctgatctcttacagaggcaaaactcccaacattccttgcttgccctttggctctatttggggaggtgctctgtggaactaagtggtaaagggctgctgctttgctggatgagcctcagatcccaggaacaggtagaaggaaagggctctgatcatgcccctaagtgggggtgctgtgccactcactacctttgtctttttgtcttaccttccacctcttctggtgatggttaagaatagagttcctggctttggtggccatgaatctcaatagttcttgggatgagacaaaggaacaaagggcaatgttttctcagctgcagagtgcaccagctttgtgttatctgtcattctgttggctgtatggggcctgtggtattaacctgaacataggcaagtctaggccaacctgaagcagcagagtagctgtgtggtttgaccacagggtgtcagatctaggctgccttgcccagccaggaacccatgctctgcccatcctgagagcctctctctccacacaggtatacaagagactagaagggcttcaggcagggcctccctgggagctagaggttgccggccatggctccccttccccacaggagaactcctacatgtctaccactggcagtgcccagagtggggatgaaccatggcagcctctagtagtgaccacaagagccccagcccaggctgcccagcaactccagagaagtcccaaccagccagtggaaagtgatgagagtgttcccggcctctctgctaccctgcattcctggcacttgactccaggttcccacccaagcccagcgtccttcagagaggctagctgtacccagggaggcactaccagagaatcaagtgtgaggagtagcccaggcttccagcctacaaccatggaaggtaactcggaataggatctcccttcttaacccttctccccaccccatgcctaaaatcaaaagtgtagaattctaggttctgtctaggcagcctgggagcctggtctgtgatctgatctctcccaacctgggccccagaatatactggagaattctgccctgcagccagcatcactagcaggggggagctgggaagactctggaggctagagtgtcactcaagattgcagggacaagccgggcgtggtggcgcatacctttaatctcagcacttgggaggcagaggcaggtggatttctgagtttgaggccagcctggtctacatacagagtgagttccaggacagccagggctacacagagaaaccctgtctcgaaaaaaccaaaaaaaaaaaaaaagcagggacagctaagaagttactatctctgctcaggctcacccacgggcagctcatccctgctgtcatcagaaccaccacagatcatcatcaacccagcccgacagaagatggtacaaaagctggctctttatgaagaaggggtcttggatagcctgcaactgctgtcatcaggctttttcccaggtacctgtggataactctagctcagcttccccagaagagcctcccaccgctgtcatacacacatacaaacatgcatacaaagtcatactctgcagctccagggcatacaggcataattccttatgtcaaccctaaacagcagaacatttgttctggctgcacaattaaggctccacttaccaagaatataggacccagcttttgctcaacatctgtagggagatgcctggctcaatcccttacttcccaccagtagcactcccacatgctcctagaaaatgtgaagttccagcaggaattttctactccaggtactatatgaaaagctgctgtttagccaagcatgttctgggcctaggaattgctgggataccttagctggggataagagtgtacctgtaaagatcatccaaactagcaggccggagagattgcccagtgaataaggcaatgggctgcttttgcagatttacttggctttagtttccagactccacatttggtagttcacagctacttgtaactccagtcccaggggatctgaatccctcttctggcctccgcagatacctttgtatatacatgtatatactttgtatatacatggtgtatttaaaactcacgtagaaacacacatataaaaggaaaaatcttattttcaaaaagcaaactaaaggtataaagaaaaccttggctccaaagactgccctgagctgggcagtggtaacgcatgcctttaatcccagcacttgggaggcagaaacaggcaagtttggggccagcttggtctacagagcaagttccaggatagccagggcaacagacaaaaaaaccctgtgagaaaaaggtggggtggggtagggaattagctcagttgtagagcatttgcttagcaagcgaagtgccctgagttccagtctccttcccacatgctcagtttggagtgggagggggcccacaaagttctgtgctcatggttcatgtcagggtatttgaaagacaagaagttgtccccaacttattaagtgatattttcttttccataggcttggatttagaacctgaaaagagccagggacctgaagaaagtgatgaattccagagctgatttgttcactctgacaaatccctcagactcagaggtcaaagttctcatgcttggaagttctcatagtgtgcaaactcctcagtagcccaaaggcatcaggtgtgggggctcactctggcaaaggagagagggcagtggaccctgctgttctcagaatgtgaacacagacagggccagccaaagaacttgatagaagctgataaggcaggcaatgtgaggccagcatttgtgagcaaggcaagcagagtacctaaggaattgggtagtacaaaacagaagactggggctggtgagatggctcagtgggtatgagcacccgattgctcttccaaaggtccggagttcaaatcccagcaaccacatggtggctcacaaccatctgtaacaagatctgacgccctcttctggagtgtctgaagacagctacagtgtacttatatataataaataaatctttaaaaaaaaaaaacagaagactgctagctacacaggcccagaggacacaagtaggtctgtttgtatggtgggagctagctcccctgagagctagataatatatctgcagtctgtgagtctattcctcagaacttccctaaaacaccaagcgaaagtagctgt

SEQ ID NO: 1034 - DNA, 82772 bp, Mus musculus
acagctactttcgcttggtgttttagggaagttctgaggaatagactcacagactgcagatatattatctagctctcaggggagctagctcccaccatacaaacagacctacttgtgtcctctgggcctgtgtagctagcagtcttctgttttttttttttaaagatttatttattatatataagtacactgtagctgtcttcagacactccagaagagggcgtcagatcttgttacagatggttgtgagccaccatgtggttgctgggatttgaactccggacctttggaagagcaatcgggtgctcatacccactgagccatctcaccagccccagtcttctgttttgtactacccaattccttaggtactctgcttgccttgctcacaaatgctggcctcacattgcctgccttatcagcttctatcaagttctttggctggccctgtctgtgttcacattctgagaacagcagggtccactgccctctctcctttgccagagtgagcccccacacctgatgcctttgggctactgaggagtttgcacactatgagaacttccaagcatgagaactttgacctctgagtctgagggatttgtcagagtgaacaaatcagctctggaattcatcactttcttcaggtccctggctcttttcaggttctaaatccaagcctatggaaaagaaaatatcacttaataagttggggacaacttcttgtctttcaaataccctgacatgaaccatgagcacagaactttgtgggccccctcccactccaaactgagcatgtgggaaggagactggaactcagggcacttcgcttgctaagcaaatgctctacaactgagctaattccctaccccaccccacctttttctcacagggtttttttgtctgttgccctggctatcctggaacttgctctgtagaccaagctggccccaaacttgcctgtttctgcctcccaagtgctgggattaaaggcatgcgttaccactgcccagctcagggcagtctttggagccaaggttttctttatacctttagtttgctttttgaaaataagatttttccttttatatgtgtgtttctacgtgagttttaaatacaccatgtatatacaaagtatatacatgtatatacaaaggtatctgcggaggccagaagagggattcagatcccctgggactggagttacaagtagctgtgaactaccaaatgtggagtctggaaactaaagccaagtaaatctgcaaaagcagcccattgccttattcactgggcaatctctccggcctgctagtttggatgatctttacaggtacactcttatccccagctaaggtatcccagcaattcctaggcccagaacatgcttggctaaacagcagcttttcatatagtacctggagtagaaaattcctgctggaacttcacattttctaggagcatgtgggagtgctactggtgggaagtaagggattgagccaggcatctccctacagatgttgagcaaaagctgggtcctatattcttggtaagtggagccttaattgtgcagccagaacaaatgttctgctgtttagggttgacataaggaattatgcctgtatgccctggagctgcagagtatgactttgtatgcatgtttgtatgtgtgtatgacagcggtgggaggctcttctggggaagctgagctagagttatccacaggtacctgggaaaaagcctgatgacagcagttgcaggctatccaagaccccttcttcataaagagccagcttttgtaccatcttctgtcgggctgggttgatgatgatctgtggtggttctgatgacagcagggatgagctgcccgtgggtgagcctgagcagagatagtaacttcttagctgtccctgctttttttttttttttggttttttcgagacagggtttctctgtgtagccctggctgtcctggaactcactctgtatgtagaccaggctggcctcaaactcagaaatccacctgcctctgcctcccaagtgctgagattaaaggtatgcgccaccacgcccggcttgtccctgcaatcttgagtgacactctagcctccagagtcttcccagctcccccctgctagtgatgctggctgcagggcagaattctccagtatattctggggcccaggttgggagagatcagatcacagaccaggctcccaggctgcctagacagaacctagaattctacacttttgattttaggcatggggtggggagaagggttaagaagggagatcctattccgagttaccttccatggttgtaggctggaagcctgggctactcctcacacttgattctctggtagtgcctccctgggtacagctagcctctctgaaggacgctgggcttgggtgggaacctggagtcaagtgccaggaatgcagggtagcagagaggccgggaacactctcatcactttccactggctggttgggacttctctggagttgctgggcagcctgggctggggctcttgtggtcactactagaggctgccatggttcatccccactctgggcactgccagtggtagacatgtaggagttctcctgtggggaaggggagccatggccggcaacctctagctcccagggaggccctgcctgaagcccttctagtctcttgtatacctgtgtggagagagaggctctcaggatgggcagagcatgggttcctggctgggcaaggcagcctagatctgacaccctgtggtcaaaccacacagctactctgctgcttcaggttggcctagacttgcctatgttcaggttaataccacaggccccatacagccaacagaatgacagataacacaaagctggtgcactctgcagctgagaaaacattgccctttgttcctttgtctcatcccaagaactattgagattcatggccaccaaagccaggaactctattcttaaccatcaccagaagaggtggaaggtaagacaaaaagacaaaggtagtgagtggcacagcacccccacttaggggcatgatcagagccctttccttctacctgttcctgggatctgaggctcatccagcaaagcagcagccctttaccacttagttccacagagcacctccccaaatagagccaaagggcaagcaaggaatgttgggagttttgcctctgtaagagatcaggtaggtactttgtagctattgctatcaagcagggcaagtacgaaagttttcttgctggccactatgtccccatggttaactggcctccccagggctacctgggtcatggggggcctcttcttggcccgacggtgcatgcagcagcaagctagttgagccagggccaggcccaactggggtgggcagggcccaggtctggagtccaggtgcttcttatagatctgggcagcaattggagcagcccaagcatccgtggctacacccacccacagagtaggctgggtgcttttcagggtcactccagcctcttcagcctcatcttcaatcaggtctttctgtaaaacaaatactgtcagttcagcatggttccaccaaaacttccaggccactgccactcagtcctctggtcttctttccctaggttcattaaacaccactgtgtgcctagtgctgtctggggctctactgataacagccacaaatcaaacactctgggccgtgttttacagtcctgacatcccattgcagtgggggaaacagatgccaacaaacctactagtctgttagcaaggtccgtggggtctgaacaaccagtacttgagctgggatgtgctaatggacgcagtaaaggaaggagggatgggtagaatctggttcagtttgttgggttggttaaatcccccactgggcccaacagtggacaaaaataggcttcatcctggagaagcaatgggagatgtaactctgtaaaaggtgacgacccagcattagccaagcatgttctgggcctaggaattgctggaatagtgttcctgtgttaaagtctgttttctatatgggaaactgaagctcaatgaagagcaagaatttgacccatgaccactgtgttgatgggactaaaacccaggtctcttgtctttttttgttttttgtttttaaaaaaaacaaaaaacaaaaaacaaaaaagacagggtttctctgtgtagctctggctgccctggaactcactctgtagaccaggctggccaaaactcggaaatccgcctgcctctgcctcccaagtgctgggattaaagacatgtgctggcactgcccagcttctttgtatgtttgagacagtgaaccatgtaacttactctggtcttgaacttactatattactgaggataactttaaatttctgacccccctgcttctacctcctaagtgtacatgccaccataatcaactaattttgttgttgttgtttttgatagaaggtcttgttatatagccccagctggcctccaactcctggcaatcctcctgcctcagatttttgaatgttggaaccaaaaccatgtactcagatgctaagctttaggtctcttattccttagccctatctcagtgtacagcaaggtagacaggaatgtaggggtcaggatggcttggagctgctactttaacagcctgcctacttcctactgcctttactcagccctgctctaagttccactgaaggtttggtccccggggtatctggaatagccccctctctatccccagtccaaggcagagggggaacctgtcaaagttctttttcccctttgatggggataggacccagggccttgcatgcaataaggttctaccactgagattacatccctatcctcaaggtctaggtacaaactaaagataggttcttccgtgcaaggtaaaagaaactgcttgggactcacccacttttaaagatgagtcagcagcagcagtagcaggctattgtggggcaatgtaaaggatctgtaccatcccaccctctggggctgtacccactggctgcagctgcccctccctccctccatgctccaccttaggaggctcaccaaatacttggtctttgcaccttgtgtcctcacagccctctgaccagcaagggtctccagtattacctagaggggggatagacaacatcactttagcagggagaaattgtgtgtagaagaggcttgtagcatgggcatggatcaggactagtgggaaagtagtcccggaacaggcaggtacagaccacctcccagcaagggcagcattgttatgggatgcaagcttaagcaaaaggatgcaaattatgaccacaatttagtgcaagggaagagggaggtgtatgaggcagggtgatccctaaggccaaagctatgctagctccccactaggctcacctctgccttaggcctagaattctctaggctttcctgactttacttactggtgcttttccctccccaagccaacagaagggctggtggctcaccaccccaaagctgaaggtatcggtgtccacagccagtcggcctgtcttgatgtactcctcaggcaagtaggcgagggtacctcgaactgtggaagtccgggccacagtactgctctggcttgctttggcccccgcaaagcggctgaaacgagccaggccaaagtctcccagcttgggcatcagtctctcatccagaagcacgttagaacttggaaacaaacggaagaatggcaccagttcaggtcctactacctttctgtttttctgtcccctacacccaaatggtcctgataaactggactagaggcgtactgcttatggaaagtggctgcattgcatcccagctgtctgagggcccgcagtccctgagccccttcacattgtttggcttctgctcaccaccgtggctttatttgtatacttgcaccatgcaggggtactcatagccctaagtactctcagctctgaggtcccaggcaacacctgttcccatattcacaggactgggcaggaagaatatcacagggacactcagaacagagctgttcattgagcagagggtcactgtctccctggccatatgactttctatagctcttctgagcccctcctcacctcttgatgtctccatggataaggctggggctatcctgatgtaaaaactgaatagcccgggctgtgcccagaagaatgtccagtcgttgaggccaggaaagtggggagcaggcctgggtctggagtgacaaagacagaagcacagaggcagctcagggcagctgttctttgaccccccccccccaaattcccctcacctgtcactgtgcggcttggggcaagctttattctgagcctctggagaatgaggagtaagactgtctatgacctaattcacgagcaagtggtagctaaagctataccgaaggttttggcaagcactctacagctgggataccagctaggaacatttcacaggactcaagacaaaatgtgatgggctcagctctacctaacagaaagtgctggtgcccttctccctctcctctctcaaaacagtttgagaaggaagctcttatcctgtatatgtggtggcttgtgagtatgacattcaggcatggctcaagcttgggttcagtctgacagcctgtctccactggtcctcattcctcaagagctatatgtggactaaatactaaatcctttagctactctgcttgcaaagccaataactcccaatagaggaacagtggggagaggacagaggaaagaattgtatggaaaatcttgggccaagctgagtgtaatgtaactctagcatagagcaggctgacgcagaagaattgccagcttgaggctagcctgagctgggtagtgaggtattgtctcaaacaatcaagccagtaaaaaggaagaaagaaaaccctgggccaaatcttgagtttgagggggagccagaagcccaagtcctgcctgacacaggctaaggggctatgccaataaaggtgccagatcagcaaggactacctgaaggtggagctgatcctccaaggagccattgggcaagaagccataaacaaggcagtataagccactctctgcacagtagccagcaaagtctacgatatttgggtgacgaaacctgttataaagagtggagtctgagttctttaattttctgggttctactacttttcatcaggccaggctaggtaggcagcacttgatgttccctcacccatgccaggccaggccttgagggcccaagggagccagatcttgtgttgtgcagtcctaaagactgatgaggccgtggtgtggctcaccttgtgcccctagacaggagggacccccaaggctcaccttgatagctgttccacctctgttaagaagctctgtttcaccatagtccactctaggtcagcttcctgtagccccaggcatggtggggtaagaggtagggaaagtaggtgacatgagccaagcttgccagttgtttccaggcccaaatctatggaaggcttggggtccttgaaggaattgcttggggaggctggagactgcagaagtgaggggctgatggagggaggaactagacaaataaggactgatagattgtcttccaggtgtctaccccaatgttacacctacctccttcagtctcttcacagcatatgtagtatttctcatgactgctcggtacacacatccaaaaccaccctctccaatcctgagttcttcagagaagttgcaggtgccttgggaaatctcacagaagggccagcaaaacggggagggatgggctctttggaggccagacactgggctctctgggcttgactgctggaagagaccatggaccaggcgaggaccctatctattccctttggtccaggttgaaagctcccttcaacactagttgtctctcagatgacctggctgtgctgatttgggctctgtggtacaccaaaggttaagtttcttcctctttgtctggaaaattccctgggggttaagagacacctaccttggtggaggaaggggctgaagatggtagtggtggcccgagggaaacagggagtggaacctggaggagctctgactcagaatgggtctgggagcctggaaaagcttcataaagatggcagtgagaggcagagaccagcagcagtctacagccatgtcagcagtcatggtggccttttcctcaggcatatcaagcccaacacccgggttctttttacctggggagaggaaggtggaggcagaggactgcaatttccgggggctccagtccccggcctcagagcctgcagagatgctgctgggccttggggcagcggtgcttgggggcacaacgggggcaggagggtgccctgggataacaaggaaggaaaggagggttgtgactcagagctctctatctctaagtgaaggggtgggggggggggagttcccatatggttccctgtctcaggaaactctgtacccgtcacccctcttgggttcccatccctagggtccctggggctatgctcgctcacaggctgtgatgatgtccctcgcacgcagcagctgcaggtgcgtgaggatgtgaacgaggtcagctacgcgcgcgttgcggttgatccagggccacagaacactggctgtgcgctgctcggagcgctcgcacagccgcagctctgtctggtcgcgcacgatcaaggccgctgcgggatggggaacatcaggcttcagctccagaagcctgagtccaccaccccacgccggcctgccgtcacccaccgaactggcaccagtcggcgggctccagggcgtccatcactttgtagaagcggcacataacccagggtggcacctcgtacaagaagtgctgggcgcctggaaccacaggctccccggggcccggccccccggccatggccgccgccgccgcccccgggccgaggcctctcggggcctcggcgggcgcgggccttagcgggccgggtccgcggacactgactcacttccccttcaggccggcctcgtgcgacacccggccgggcggaagaggcggcgctcgacccgccgccatcttgccctccgcggccttccgccacacgggggcgtcccgcgccgcccttgacgcggggaaggagctctgctacgtaggagggagtccctaatgggagaaccgaggtctgtggtcctacacaaacatctgaatagggctgaacaggatgaagaatgacttccagttctagagacaaagggcacgatgtttttacacgatgttctacaaaggcagtttatgccaagcctggtgaaagtcacggagaggctaccctcgctttagttggggagcagtttgagagccagccaaattgttggtcagtcagggttaaatatgggtaacaaaatggccctctggcagactgtagtcatttggtgataaggatggatgccctgagaatggtctggaagagtgtataccatgctactgcttgtgtgctagatctccatgcccccaccacgcccccaggaaccttccagcagctgggccagcaagtgttagatcacagaatctgcctgtgcaggattctaattagctttccaactaacacatttatgtctcttaacatacacatggtgttcggctctaaatgtccctttcctttttctgtcacacttttatcttagtttgcacttctctccataaggatagtagggtctagcagcttctcctacccctttctagagtagttgttggtgataccacctgttgtgacctttagccacatgaatgagtgtctcttgcctattcctctactgttctccattcagggttttctttggcctttttggtcactatgacacacatctcagcgcacactactttctcattatgctctctgaagtcctcttcatatgagtgcactactcttagcattagccattgccactcacctgcacagactgtatggcttggatagtgctccctgctcaggtggtcttcctcaagtacaaatcactaaagcccagctctttaaaagagctgttaggaagatggcatagccagcctctgtccacccacctgaacttatatacaccaacagccttaagccagatagaactctttagatgttgggcttggtggtacacccctttaattcctgcacccagaaaacaaaggcaagtgaatctctgtgaatttgaggttagcatggtttaagttccaggtcagccagggatacaaagtgcaaccctacctcagatcaagaccaaacctgaaaaaaacaaacaaacaaaaaacaaaacaaacaaaaaacccaaaccctgtttagtaggtgtcctgaaaagaacttattctgttctgaaattgagtttgcatatacacccctgctgtagccattcctgataagattgaacataaacagctgtggggaaaacttcctaaacccagctcctctcttgaacacaccttgagcttgctggagttctgtacctctaaacttttctcacttctcactgcccagggatgatccacaggcagcaacttggtattccttgtttggccagctgaaagcatgcttgtaaagcggcagctttcttctcctgaccagtttccccaacaaacactttttgtcatatcaatcctaactacaaagggttctctctcactagcctgacctctaaggaacttatagtatgtcttcagaaaggtctacacaagatccatggctggctcccactggggcctcttctttgaagccacagtaattgtggccactctcaagatgaggtcaaactagatgtggtggtgcatacctgtaatcccagaactctagaatcagaggtaggaagataactaaaatttcaagggcagcttggtttacaatgcatagttccaggtcagccagagctacacagtgagaccttattataaaacaaagcttggcatggtggctcatatctgtaattccagcacttgggaggctgaggcagatcaccctacatactcagttccaggccagcctagagtagaagttggaccctgactaaaaccaaaacaacccaagaggttaaccatatgctgagcttccagtggtttctcatgggtcagtctatattaagatgtgccaactccattatccaaaattatcatgtgtatatatgttaaactctatgggcagggatttggtcctttttatggacgggggactctcagtgtctggtacacacctggtactcagtgtattctccatgtctataggttgaatcatcaatcctttcatgtaacatttgaggccagaacttcaagatagcttctaggtatgctcacaattatttgtgacatgccattatcctctcctccaggccatatcaacctatggagtaggtggctgcagaaggctcatattcttacaggaaaccagtgacacaaggactccctttgggcagttcctcatagttgggaggaaagtgttaacactatggcacaccaggacctagcagctgcccctgccacactggtcaggagagggaagctatgctctaggcacacttgtgtcaggccttcctgtcgaatgctggtgtagtatgcttgaaaaatattgacacagagcaaactaaggaggatgccagtatatgaaataggcttccctaccctcccacacctatcctgagagaggctactggggttcagggatagctgaatcaaacatatcatgctgtcaggtgagctggaggggactggtgacttataatgaaagcccagaccttgagtcactttcacagagagatttatcgagaatgctaacagcacaggatacagtacttcccaacaaaaggtgcaaacgcatcacttagaaaggcatgctgagtattctttgctttcacatgtattaaaaaacttacaaaaataaaatgaaaccgcgtgctgcccatcttttcaaatagtaaaagaaccttatgaaaaaccacttgattttacaacaaaagacacaaacggacatttttatgtaaatttataaggcaaactctttatataataaataggttacaggggttcagtggggtgtgtttttgaaacgtatacaggtacattcagacaggtttactgaaatggtacaaatttccttaataaattgccttttgtttttaaatatatcagtgctttcagtcatttggctatacacaaagaaccttttgttttgaacactacaaaaaagcaatcaatattttgtttttaaaacgacctacttattttctaaagtaattgtcccaaagcacaaaaactgaaggtgaatacgacagagggcttttcaagacccctccagcccagctaggtctgtcctggatctttctctctgccttgtctgcctgctcccaaccttagatgagtttttgagctggtgacaaacacaaggtggcttgtcactggctgcactattctacagatctcaccccccctggctggcagaggggagtacaacatggattttggagggggcatgtaccctgtctggttgttccagctaataactactatagccaactggtcactacaggtagaactgtccacatgaggctccaagggaacactgctctgttcctcttacattaggctggaacaatctgcaatgagaataacactttactgaggatgtttgccatagaaacaggtggtatctcaggcccagattttgttgggaattagatcacattgaaggaaaggagtctctgctatcattttatcccccaggcatggcgggaacagagatatcagattagtactgtgtactagggggcaacatggagtatgacagaagtgtcctgactggtcatgtctttgaaacatgccttgtagacaataatgtccatggccttgacttatctattaagaggtatcttaggcagggagcggctaatttatcttctgtcttctccccatgtccacagtgggtcatcctcctgaaaactcagaccaagcctttccatactcagtgagcacagctctgtgttaatactcctttccctcctggcactcctagattattacagcagtagtaataatctgggaaggagaagcaaagaatccattgggtggaaaagctggttttgctttgactttgaaaatggcaaaacatcagcttcagtctcttgacttggaatggaaaaccagtgcttaacttttggtagcttctggctgatctgggcagggatcaattcagattgcccctcttgtcttattcaccacttccctcccttcaaatgctttgtttgtaatgaaaatgtacctagaagcatttgtctctggaacaattactttaaacatagttacaatacagacttcatttcaaacacagaagagatttacttagcaaagttcctttcacccaccaaaaattacacaaatagaagcctcaacaccacagttaaagaggaccagtagagaaaacctcatgtttggaacacaaaaggaaaaataaaaccaaaccaaacccaacagaaaaaccccagaaagacaaggaaagggcaaggaaggaagaggaaggagagcaaacacagcacacattacagtgtccaggtacacagggagcccagcacaaggaaagggctcggcacacgttgagtaacagtcctggtgatatttggtcatatattcatcaactactgactctggagcggctgttattgactgaagcagtgacaaatcaaatggaaaaggaggccgtgctagcaaagtaaggaaaaggcttcaagttctgtaagccttttgcactccattgtccagctgcccagaaacattgaaccaggtggcctgctccatccaggcagggttagaggtcaccaggtgaagctaacttgggtgctgatctcacatcagccataaaacatgcatatggacatacatggtcacctacctgtcagtggccaagtaagtagcagtggagacaaccctttggcttcttctgcccccatctcatgccggctggggaataatgttgtgacactctactaatactgattactccctagagcaaggccctaggatagggtctcagaggcttccccagcccatcttccaagagctccaagggtagcccagtcacccaaagggcctacaaatatctttgctgtattctggccttagaagcagcaatcatgaggagatggggtagaggtgtgggacagattttggccctgattataatgctctctgctttggaagaacaaggttctggacttttttttgggggggggtgtttttaattatttaagaatgatccttttgcaaaaagaactgttacagctaattttttttttttagcagataatgctcattaaggattacaaaagcaaatgcagttactcatgggagcagggagaagagaaagggatgtttctggagtcttcactactttctggaggagacccattgggctgttggatgtggttctggggtccctggcattctacctggtacagcttacacaccttggagatagaccaaatcttctatcttctctctagtccctagactcagcaaagtttggagggtttttaaatgctctgagccctgctaactggggaaagcttgtcagacttactgtacacaggctcttcctggccagggaaaggtggagggagttgggtcacccccatgcatgctagctccccatccctagaggtggggactaggctattcccactaagttctgtacgtcagcatgtaaagggagtgctcttgtctcctgaccccatgctgaaatgaactgtcctgtacccagaatcttggggcccctttcacaacagaggagaaacaaagcacaaaacctgggtgcagcctggagcttccttcacttagcacagggaagtctttgaaagacgcgaggaaagatcacagatctgcttggattgaagaagtgaccagcagacagatgtgttttttctttttttttttttctttttaaattttttcccttgtcctactctatggttatcagaaatattgtaattaagcaacaggtataattttaaaaggtttttctttttgtgtgtgtgtggcgtcacaagcaaaatgagtttataattgtgaaatatacagatatatatatatatatatatatataaattcaactgctttgtgtgtctagttggtgcataaaataaaaataggaaaactaaaagcaaaactgaaaaacaaatcaaaagcccagaatagaagagtcaaagcagacctatgcatacaaatctcttaagttactggatctaatcagagtcaccaggaagaacagctttgccacttgacacacaaacactgcagggaaaggactatcagtgggcaggagccaaacctctttgccttttcagcgcatttgctttcagtgctaagcagggccccataaaaggtgagaggagcaaggagcaaaggtcatttgcaacttgtccaaatgttcttaaactccaagatggcacttagttcccacaaggggctgagtcctgcttgtgcaaagcctaggaggctgtctttcctcccagagcctttttactacctgcctgcctcttcctcttttctttctcctctccattctatgggctctaacacctccccagaagacaggcagactggcttaaggaggcagggagaggctctggggtaagtttaggagggcatgccaaagtgcttgctacacagccatttcgtatgtgccaagatcctgaaggtcaggtaggtagagtacaaaggatgggagggggcccagggagggatgctctgtaggaagtagaccctccctaatttgtgcagtagtgctggggcaggctcagttaagaagagagcagacactttgtgctgggccttctaggttactgagtgttcaaattgataaaccaagagctggtctcatgcagctttggcatctggcagaccactaacctccattccaaatgacaaggtcagaagtagtttctggggccagctacccaaagagtggctttccaatgctaaaacacctcaaatctcaagaggctcctggttctacctcctctgatgcaggaggcttcagccttgagttcccattgctcagttcactcattagacacctcaggcctaaagtaagtatttatagatcaacattttttcaaaagcctcctcttattcataaacattaaaatataattttttgttaaatgttttcaaggttttccttctaaattgttcagaactggtttcagtgttcaagttttcccctttagcatatatttttagaccctgggggaggcagtattctagcaatttataacaattagactaagccttttctatatagtacctaaaagagaaagacataaaaatggagagaatcaacaaatctcttcagagtggggctggttcactgaagcagagagcaggaagaaggagccagaaaaggatgtggatggagcagagggcttggctctggcatgaggcatgcggcatctgccctagcccccttcagtttttgtacttcgctataccacagtccacaggggctttttttctgagtctcagtcatctgccctagaatctgtagtgttaacctgaatctacaatcttgggcaaagatataggctatgaactgatgcacaaaagtcttcttgaagaactggcacctgtgatgtctcctcagcctgaagagcctggctggaatgctctaggagactgtagtagagaagtgctgcagagttcagacagctggactccatttgggctgcatgaaatcaggctggtctcatctggtcagttctaacccttttgctttttcctggatgggtttgagccacttattacaacctatttaaaatccagaggtgctgtcagctaaggaatttcctttctctgccaaacctggcagtctgttttaagttactgccttgttttatcattgtcagagcaacggaaagctgaataaagcagcagcaattcgggttgctctggttcccacgtccaatgttcatggcctctagtctgttgtgatagcactgaacagagttgtctgtacccatgctgggatcatgggcttgtttggcactgatggactgggggagatggcatttctagatctcccctgtgccttttgatatggaaatacagcaccagcagaaaggagctgtactactagagcctggctgtgaccaagagtcctcaactcactgcacaccaagggcagcagttccactggttaagacagactcaagaacaggcaagcttgggccaggatgatcatagttggaggatatacagcaatctatctgggagaggtagtagctaacaactagaacagggtagggaagactggatgtgaccttagtgacctagccccaggtatctgaaagctgttggtcagtttctggattcttcacatattcagtttaaggtaccacccacactttacaatgttcaaatacaacaaaataaaggtcacattccaggtctgagccagacacagctggtgagaatcccatgacttaaggcttttccctccaacctcctgtcaacctgaccacaaggcagaggcagcctgacagggtccctggcttccaggggaaaaaccccaccaaagctgcctgcttaaaggagactgacttgtgatgcccttatttgtggatgagggaatggggaaagaagcaagaagtgaagaaaaccctaagaagctgcagttaccaccacctgcagttttgaaatcagttctacatacaggtaagtggggggtggtggtggtggtgagggagctgcagataaaacccaagtaaaagaaaaacggcacccaaagtgctgcaatcccaaaagtaaatatctaatcagcctaggttgtcttccaaagatgagggatacccaacttggagtccatttgattggactaagtaagcctaacaggtaaaattccaagcagaccacaataaacaacttggtgtcaacctggctaggtgttgtgaaaagtatggaaaggtgtcctagaggagtgcatggggcaggttggggtggggcagtaggggccttttgtcactggaagaagcaggagttcagaaggacatatcctggatcctccagaattcctcttctgacccctcctccctctccagggaggaaccagaagcaagactaagaggatcaaaagcagagcaggcaaaaggactgcctgacagaaagctggttgcagggtttgcttttatagcacaaggaaatggatacaaatacactaaaagtccaactatgattcggcaaacagaatggggcaagatctctcacttagttctaaccattccataagagacaaacatggttttatcttaagctatcaattggaactgtcaactacggttcctgatcactaaggactggccaggaagtgctagacgatttctatgatgtttcactcttccatgattacaccgcaggaaggaagctggggaacgttaacgaaaatacacaagacaatacacactcgacagttcatggcagcagctcacatgggacgtgcctgtgggtgtttctggaagcataagactgctgtctcatttgctactttgataaggtacttctcagacagatttcgatagatatgagacatctctgtaaacacagaaaaggatataccaatatgatgaagatatgcagctagataaggacttcctgaatggaggttaaaactttgggatcccaaattaaaactgaccaattaaaaccccacagcaaagtcaagtctataaaattcaccactgtacttatggagcagagtttgaaatatgggatgtgctgatgcttcccagtccccagtgagcaagaggttaagaattccactagaaaaagacttgggatgtgtatgtttgtcagaagaagggccaagggccctggtgtcactccctgcttaggtctgcatctgtcctgacaggtcccctgcccacactaagtatgacattagatttctgagtagggtcaagggtagtgggcatggagcccctgttgggccatgcaacgactctggcaggccataggggcctctgtatctccttcagctacccaatgtgacccagattttctagtccacttttctagagtaaaaggtgaaaaggctcattgtttaaggtctgaaagccttttgacatttttcttagcaagagcaagagcttcctaccttcttgttcttcttcacagaggttagggagggctcaaaagagcccagctcttgctcaaggttaaatatgatacctggcactggcaatgggaagttaaagggcaggaagaatcctagggctgcagctgactgctgttaggtaaccatgtggttcagcactgcagctgcctggaacagaagaaacaactagaagctaggggaagaaatgaaagcatgaaatggaaggaaggaagaaatggaaggacgagagagaaagcaatcaggaagtccttataaaattgcagcaaacacttagagtttcggagcttcttgggaatcctatgtgctgagcccactttaaaacaagcgcaggtatatacagatacaggtagttctgaacactgccatgtctggtggcttgtgggacagtgtcaccatttcaagccagtttgctttcagagcatctgtttgttttgaagtgggaacatgaagactcaatagtgcaaataattctaagctgtccctaaaggagaactggaaagtaattggaagaatattttcctttcttccctcttaattactagtcagactgctctcttgttctgtggcactaggcctggcttgactccacctagcctgcctgtactttgtcctgctgcctccatggcacctctttagcattatcttctaggggagcatgccttgtgaacagatgatgacacttcactctgggccatactcttctgtggctcaggctagtttataagccatcagtttaggactcacctctagccatgtcagagctggatcagacaggtgccactttctttttttgcaaaatatccttgtcagttttggattgggttgatgtggagccagatctgtgctaccacagttggaattactgggccttaatcactggccaactccatagtcttctcccaagagtcccatagtttctcctgcatcacacctcccagtccttcagattgggagttggggtggtgtaaaagtcagggaagctattatggacagggcatcaatggcaccaaaaatgggagtgtcctctcaattgccctaacgagcacacggggcgggggtggggggggggaagagggaggatattgttggggggagtgcctggtcaacagcttgtctggtcagtagtatctgcagcaagccttgttgaaggagcctagtttagaaaagtgcaaagctacttctggccctggttaggtcttcaacctgactgtgcttgtcggtaagaaaaacatcccaatgctccaactactcccaccccgaagccacgaaactctaagtttactgaaagaaaaaaaaatattttttatttcagttaatcgggaagctttgtcagagccctacccataaggagaagagacaacagctgcctttattcttgttggtttgctttgcaatccgctctatgtaaagtcagctaactctctcggtcacgggcgtccggctgtccacaggctcctctctgtttggccttggcatggaagatgaaacaatgtctttgcgctctccctcccctcggtgtttgtacttttctgcaactgtggtagtggtggcgaccataggctgagtcttagctggctccttggggcagccatcgctttccagtgagcctcctcggggcatcttctcttctttgcagatgctgctgctcaagtcctgaggctcaggggggctgatggggtcctcagagctctcaggctcaggtgggggtggggatgggagcagtggcatgggggcctttgtggactctgagtgatggtggtgatgatggtgctccttcttaggtggggaggaggcactgctgctgcgccccttggggctgctctccttgcttttacgcccagggctcttgcaggtcttcagtcccttcccgcttttctcaccaagggtggacaccagcaggggcttcaccacttccttgacctcgatgctgaccgtctcccgggtcttgcgcttcttgatggggagcacagtctcatgcacagaccgtatggaagactccttcacggctttctttttggcctcagctgcagcagctgccaccacactcccaggctttctaccccgtttcttaggaatggcctgggggtcagcttcagcttttcgctttctgccagggcgtttgatcaccatgacctgggcagatgtggtagccccacctccctcacccttacccccaggcgatgcttggaaaggcatcttgacaacaagtttcccagggctcttctccaggacccttttcacctgaacaccttctgatgctgctgcctttggtctcccagtgccgctccctttggggcgtccccgacccctgccagttcctggagctttgggagatttgggcttcttaggtggtttctgctctctcctggaggggctccctctcccagttaccgtgaagtcaaaatcattagggtccaaggaggtgtctcccaccttttcaaagtatgcaatcaattctactttagagcgaaaagcttttccctggggactgtagaaacaaacagagagacacaaacaatagtcagaagctttttgacaacatagagactgagatagaaaatatgctgacaagctttcttctaagacattgtaagtgaacaaggaacaaactggaacacaaccgggccagatgcatgggtagaaaccatgttacagcttgctcagaagccaaaacagctggatctgaaaacagaggacctgccggccttcaagcccactcctctgtactccctggcttttccacaatccttaaactgaaggagtgaggtctagtacttgggggtcattgggctagactgaatatctttggttggtacccagacctaatccaccaccaaaacattcctccattttaaccaaggcatggtgtccagcctttttgggaagccatttcagtgcaataaagcttttccatcctagccttcctacccacctggccttcttgttctatagacacaagacttgctcttacttacttgatcaaatatacatcatactttccagcagatcggccagacttcctttgtttaagctttcgtgtccaaccttcaggcaaggtggggtcatcatacataggtccccggtcacggataatggagcgccgctgtttgggggaagccgaggcttctggcactgctggggcagagcctgagctttctgatgtttctgctttgcctgcctctgctggctctgcagaatggtgggctgaaggttgtagtggctcatgcttgccttctttgtcctccttcttgtctttcttcgccttcttaaacttcagtggcttgtctctgaggccctggagatcctggtcttctgacttttcctccctgaagtattaaacaaatatgtaagtattacagagaacacagctgtctgcacagtagtgagtataggtgagcttgagtgccacacatgagacccctggctgctgcatactatctctgattttggtaacttccctaggatactgtatccttgggtcaagctggggcccaaagatttcttaacagctttaggttgctggtgatattggtcaaacatatttgacctttatcatacttctctaaaccctagttctagtgctgttaaagtggcacattttttttctggaatgtaagcactgtatggttggcttcttaacatacagaagtcagtttataagttgcacccaatggccccctgggcttgccacatgacaagacaaaaacacataagataaataaaataatagggcaaagccagaagagggcatcggaccccttgggactgaagttacagatggttgtgacccgccatggattggtgggactgaatccagggcttctggaagagcagctggcactgttaacttgtgagccttcgttccagcctcctgactttccaattcaaaacaagggccccagcaagagatttcagcggtgtaacccaatttcctcatcccaacagcagctaatctcatccctgaggcattccgtgagaattatggacaaaaggcctcaaaatactgtaaaactattgctaactcagggaaatagcaactgctgcctagggttccagtatgagaaaaaaggtatcttgggtcacatgggtctttaccacaagatattactcccccccaaaaaaccctaaatgccaaaaccaaaactaaaccaaactggagggtggggaacaaaaccaaaaccaaaaccaaaaaccctatccttagcagaaaggtgtaatagaacagtgtataggccattagcaactaccatatccaaggacacctgcctattctttcttgtagacagaaatagcctccttctatgggttttggttcttttttggggttccttcatgtactttagggttcaaagcctgtcttggatgcttttaattaccactgtagtgcgacacagtgagcctttctctgactagaatctggtcacactgcactgcccctctgagctacaggccagactaaggaaggtttggaaagaagtagcagctgcctattggtctaaaactaagagaagaattaggttagggctatgatgtgcatctggaagcctgtggtctgttcacagttcaatcttcagactggcttattcagaagctctcagtgacagaagaaaagaaggggatactcaccagcaaagctggcaaaacaaaggccaacaggtacccatcatgtgcatataacttcacaggccccttttgaacaccagggctgctcccctgattctgaacttgagtttgagaaaactactagagtaacaaggcaggctggctttggaattctcacttgtattcttaaatattttaaccaccatcaaatataaactatatgagcaaaggaacaccttctagaaaatctaacaaccaaggcataaaataattttcattacagttttattttcagtagttaagaatgcaggcctctcaggtcctcatgaccaaggagacttggagaatcaactacgggatgcctacatattggaaggttgtgcagctagatgagtatcatgatcttttttgatgtaacaaacaaaacaaaacaaaacaaaacaaatcaaatcaaagcaaaacaaactgcagacacatttcccatatggatcaggtgtacaggattgtaggctagcctagaaaattaacaaagtctagagtaggtgaaaactaggtaagagctcttgttgaacacttctcggaatatatttttgactaatgaatcacataaatacttacacaactaaaaagtaacaaaactataatataatgcatgcaaacaggaacaaaggagcttaactgttactatacaaaaaagactaacttttgatcatagtacttctgtggtgggatatattccaaagtcaacagtaatattctaggggcagtatatacactaaaccagctcaaagataaaattggtgactctgattctggggcatcctctagtgccagtaaagctagggatgggagtacaaaaacagtgggtgggggagggggagtcaagaaaaacttttagcaatagcctaggcatggccaagtatgtaggcagtaatgaatttgagatctgtatagcagagtaatcaacaaggcagaactaagttaattgtgggcagaccgcagtgcccacctaaaaatgctgaaccaaataaatatcgtagagaagacaaggaaggaaggactatacagactaaagaataagaagactgaggagaaagaacattcgaacctaacacacaatcctggactggattctagttttaaagacacacagagcattaatgagacatttggggaaatgtgaataatgctttacattagcttattactaaacttccggactgttgtagttatgctgtgtgctattaggaaagtcagcttcaaatatttatacctgaacatcaagatgacttccaactctcaaggggattcaggggtggaagggatatgtatagtgtcaatgttataacatgttttaaaagaggaaatgacatcaatatcatcagaaaccctactagtttatggcaattaaaatcttttgaaacagagtctctttattatgcagtcctggtggttctggaactcactatgtagatcaggctggctactaacacacagaaatccccttgcctatgtcttccaagtgctgggattaaagtgtacaccacccgatggaagttttttttatggttatgctaggcagtgctctaccactgagtcatatccttagctctaagagtagtattttcaagaagtaataagcaagcttttaagaaagagtaactttgtgttacaagaaaacaatactagatcaggctgcatattacatacatgatgaattctaggctagctagcactacatatccatacccagttagtcatttttcttgttagttttgttttcccaaacagggtctcattatgtagctcttgctgtcctggaatgaaatacgtagaccaggctggctttgaactcacacagattcacctttgtcttccaagtgctgggattaaaggtctgcacagattgatttttttttttttaagcataacaaaaagaaacacctggaaaccttgatgaagcactttcttttagtagctcaaactgccataatgcctaaccacaacactacactgtatttggtgaagctccaacatggggataaaacaaatataaagctacagttttcatgtttaagaaaaaaagcactgccaaaggtagcctagtctgggctccaagaacttgcctgcccaggagcaaatgacatccaggatcttttgaagctacatgagaaagcgagcaggctggttatggtgagaagggatagttgcaatgtgcaagatagggtctcacaaagtccaggttagcctggaactcttgagtcccactcgccccccaagtgctgggattacaggtatataccatgtccagctttgcagccattttttaaaatgcttgtatgtgttggggtgtatgtgtgtgtgcattagcacatgaatgtgaaagccagaagacaattttgagtgtcatcttcaaggatgccacctacctcctctggggtctcttactggcctggaactcatcagttaggctactctggctggtcactgagtcccagggatcatcctttcttcacctccccagtgctgggggtttcaagggtgtggcatcacatccagcttgtcacatccaccatgtcagttaagaaacaacaacaataaaatcccactcctatgagtgatgacatgcacctgtatgtaatcctagcacttgggaggcagagacagaatgactagaagttcaaggcaatccttgactacacagtgggtttgagactgggctgcctcaaatcaacaaaactgtaacaaaacaacacaaaaagttctgtagtgaaaaagtcttgacaactctgaggccaaaatgttacatataaagttcctatggcctagcaattccattttgaagtacagattccaaaaaactgacaataggcctgcaatcagatacttatatgctaatgtttgcagctccctgacccctaagaatcaaaaggtgggagcaatccaagtgtctactgatggatgaatggagaaaaacctctcacgacaacgaaatgttgtttaacgttaaaacagaaaggaattctgatacagtataacatggacgagtctcaagaaaacattctggccgggcagtagtggagcacacctttaatcccagcacttgggacatctacagagtgagttccaggacagccagggctacacagagaaaccctgtcttggaacaagcaaatccatagtaacagaaagtcatttgccagggctgtgggtaataaggaatgattacaaatggatatgagagtctgcccccccccccagagtggtgggagatgaaaatgtttgggaattgctatatatgatggttccacaacactgcaaacatacttgatgccattgaattgtatactatattcatttattttttgcagtgttggggattgaactcaggctttatttgtgatgggcaagtgctccaccagtagctaaattcttagctcttttaaaaaatttttatgttgagatagggtcttacaaaaagttttcaacgcaggtttctgtagcccagacaggccttgatgtgtaattcttttgtctcagccttcagagtagctgggattaccatcctgtgccactagactcagactaaactatattttttatgtatgtttgcacgtgtgaatatatatccataacatgatgatcttgaatttttgatcttcttgacttcatctcctgagtgctgggatacaggtgtatgccaccgtgtcctatttatatggtgctgaagattaaaatcaggactttatacatgccaggaaaaatactctactaattgagccatattcccagtcacatttttttttaaaaaaaaaaaacagattcttgctatgctttaaagacaggttaaccgcaatttatgatcctcctgcttctgcctcccaagtgctgatacaataggtatctactaccattgcagggcccccagaaaggaatttagttcaagaagcttcacaactaggggttttggtcaggttatagattattagctaaatatcctgagggtagttcattatgacaaaaactgtggtaaaataaacacaagcataaagcttaccattagttgcatctagcaatcattactactatctagctcctgcatattttggtaactctcaaaggaaaccctgtattcataggtagttgctaactttctaattcccttcagtccttgacaactacttatctttttctgttactgaattggcctattatgtatttcattattcacagtggcatcataaattttgtggccctttgtgactcatggctcttttctttcataaagcataatgtctttagagtatcatggattagaattttattcctgtttgtttgatttttttaaaagacagggttcctttatatagtcttggctgtcttggaattctgtagcccaggctgtccttgaactcatagacatctgcttgcctttgcatgttggtgatgggagtggaggtatacagattcaggaagctcattgataaaccatgtttcaactgagaaaggcagaagaaagtgacagagcaggacacctgatattctcttctagcttctacacatgtactcagggctacacagacctgcacacctacacaaacataaacaaaccatctatatacaatttaaaaaattccctgattatccattacactggctattaggaatagtgtttctatgaaatattcacatacaagttttatgtgaacatacattttagttctcttctacctataaacctaggagtgattactacagtacatggttactcttatgtttaaccttctgagaagctgccagactgcttttcctttagaggtacttcaaatgttctggaactagatagaagtaaagtggggtggcagaaatgcttcttgaatgctcagtagctagtggtgggtttaaatagaagtgatcctagaaccagggtatggtagtacatgccagtagtgtaagacttttaggaacattatgtgttgcttcatctcactcactcatgcattatccaatgtcccttaaacatcaatgtatcttgttcatgcttacacttgggccatcaataagactctacctgcataaagcatctgttgctgctttttctgatatggttggtattccaaaataaaagctttggtaaacataaaagatagatgccaggagctagggaagactcatcaagtagccagaaaggctccagaacaggggtaaaatggctactctaggactcactgggaaatcaggccaagattacaaacttggtaaaggcaaaagattcaggtagggtgtctttcccacagactgacctcataaatgagataagagggaaaatgtcagaatcactgtttatacaaacattttccattcattcattcattcattcattcactcactcattcattccttcttttgagattcagattcaggaagctcattgataaaccatgtttcaagggagaaaggcagaagaaagtgacagagcagggcacctgatattctcttctagcttttgagaagcctatattataagcaacttctgtttcctcactttcctttgggcctttgattctgtgttctaacaggtttctcctcctcttcttgtagttcagagactgaggaaaaggaggtccagtgacccgcccaaatttggatccatctctaggggaagctccaaggcctgacactattactgatactatggtgtgcttacagacaggagcctagcatggctgccctctaagaggcccaaaaagcatcagactgagacagatgcagatatttttttttcgagatagggtctctctgtgtagccctggctgtcctggaactcactctgtagaccaggctggcctcgaactcagaaatccgcctgcctctgcctcctgagtgctgggattaaaggcatgagccaccacacccagctcagatgcagattcttacacccaaccaatgaactgaagtcagggtctcctgtaagggagaggctggaagaagttcaggaggagggtagccccataggaagaccagcagtctcaactaacctggactccagagatctctcaagacactgagccactgaccaggcagcatacagcagctgatatgaggaccccaacacatatacagcagaggactcctggtctggcctcagtgagagaagatgcacctaaccctcaagacttgaggccccagggagtggggaggcctgatggggtagggacatcctcttggagacgggggaggaggaatgggatgaggaactgtaggaaggaggatcgggagggggataaaaactggactgtaaaaaaaaagattaaagataataaataataacaaatgtatttatacatatgcccatgtttgggtttgtgcatgtgtggctggaactggattctctggagctggggttacaggagacaaaatctgcctaatgtgagtgctataaattgaagtcttgtcctctgcaagagcagcaagctctcttaactgctaagccatctccccaaccctcttcttggtattttaaagacaagagtctctttaaccctaaccctaaaatcactcagtaagtagacacactctaagtccttttgccaatctgatctggggcagctgtccttgcctctgcaactctgcttgcaggaaacactgggcagaactttggctttggagctcatctttctggcagcctgcccactcctcttatcaggtgagggaacgatggcagagcctgatccacatccttgcacaggagttcttttttttttttccattttgatagctacacagtctttattataatcattcaacttatgagctgtagcagagacatagacaaaaacaatgcataaagaaatggatgagctgagttctagtagaattttatatgcaaaaaacaagcagtggcaggccaggtatggtgacacataactataattccagcactctggagattgaggcagcaagatcagaggttagaggccaatctgggctatgtagcaagactgtcacaaataaaccaaatcaaatcaggcagtgagccagagctaactctagggatgtggttcaccagctgctatgttaattgaagagaagctacgtaaacaagcaactggtattttcagtgattatagaagttatttggcctccactcaaactcctaaggtagagcgagaagttctccaaacacaaaatgttacctggagactgtggagtcacagaagaggtacaagataacagttttctaaagaactgaacataatgtcaaaaaaagacgacttgttactggccataacaatgtgaaggtccactggagactgataaggccaattcatggaacacaggagtgtttatatgtctttataaagttgattacaggaggtgagggacccaattataggaggtgagggaagggtccatgaacagagaatgctgggagagtttgattaaaaggggacagagtagagattagacagaggctaaagaaggtttgcatagctaagcaggaaattctaaaacacatttttatggtgataagtgtgattcatgagaggagagaatacaaatgaagtcccagggacatggaagagcagtagacaccacaagccggacagacaggaaatccttgtcatcatgaggtctgcattaggctctatgggtggaacaggttttagttatgacaaagtccagtccttgagtatgaggatgtgtgcctgaggtcactggaatggaggtggtcaaggagatggaaagtctgacactaggaaggttgtcaacatgttcaatatagtcaccttcaggatgagaggggctgagacaaagagatagaagctatgggtgtaaaaatgttctgtttctaaagtacacaggataggaaacaatcaaccagctgctgttggaagaggggcaaatttggcatgaggtgtgggtgtacagagaaaagggactctaacctgaatagggaagagtctagaaagaaaagcaagattcacactagaggggccttgggtttaaagcaggggagagatcaatctgactacagagattgtgtgaaagccaggtatctataggaaagcttacaaggtcacaggaaccctcaagagggtgtttggttcaggacagtggtagaagggctcaagggaaagatgggaaaaagagaaggacagtatggcacagcttggcagctccctaaatattggtactgtagggataggcagaagagtgtccagcctggcggactgaaagcagagcacatgtcatctggttgtgtggtcttatttacccagtttgttctgaagaagcctggtgggtcgtagggcaggcagtgagttgagaagaggcagaagagtacaaaacaaaaacaaccccaaaccaaagctttatcaggtactatttttgggccaaggaagggcacaaggaggaggggaaaaaaaaaccagaaggtagtgggggagagagataacaggcatacaacatacacctatgtgaaaatatcataaagaaaactcattattttgtaaaattaatatatgctaataaaaatattggtaaaatctgacaaaatgcatacttcatgttagcctctttctaccatagagtcaaacaagtccttggtaatttctttcagtgttctctatgactacctaatgggatgtctgctgaaacccaagcctgtttagggactgacaagaggctgaggatgacagcaaggcccatgactgttttatgtaaggtcacaagtagttatcaaccaattgcaaggactggtatcactatattaggttctttcaccatgatgctattgagctactacatgttggtaatgatataggcagaaaggagcccttataaacttgtcataattggggtttctactgctatgaaatttattgcactgtgctacgcaatgtttagactaagattttttgattacaatttctaaaaatatgatagttaatgagttaattcattagaatggtaatttcttctaaaatgtcttaggttcttaaatgtttaaagatatccttgcatatacatgcaacaccacaccaaaaaaaaaaaaacaacaaaaaacccaaccctttctctagtctagaaagatgggtgtaatagctagaacactatcctggtgaggtaatacacctactgaggggctttactttgtaaactactagtggcctaggaaacctatctctagatatcatggtacatgaaagataagtgcaatatcaactccaaattctgtttttaggctaagtagacaatggagaaatatcttaaaaatttaattacatgtacctctttctttcttttcttttttttggagacagggtctctacatagctctgctatgtagaccaggctgcctctaattcacaaagatccatttgcctctgcctcccacttgctgggattaaaggcatgccaaccaccaggcctggcaattatgtgtgtatctgtgtggggaatgtgtaattgagtagaagtacccatggaggccagaggtatcatttgcccctttctctagcttgagttataggaagttgtaagctacccagcagggtgtttagaatcaaactcaggtcctctgaagaacagcaagtgctttaatgactgaaccatctgtcttagttgcttttataatgctgtgacaaaacaccatgaacaatgcaattaataaaatagtgtttagttggcttatagtttcagaagattagagttcatgatggtggagcagggcacagtggcaaggacatctgaaagctaacatcttgttctacatattagaggcagaaaggactctaccttcctaaaaccataagttccaaattaaatgctttctttataagttgccttgttcctggtgttttaccacaggaacaaaaaataagacataatttctattagccaattcccctcattttttgagacaaggtctcactacacagcttatctcacctagaactatgtggaccagtctggctttgaattcacaaagatccacttgccacagcttttagagagctggagttacagacatgtactactatgtctagcaagggaattctttaaaaatttacgtgtatggctgttttgcctacatgtatgtctgctcattcctacaatacaaatgagatatcaagatgaacagaaacaaaacaaaagatgggaatgatagaccgtatgtgagatttatttgaaatattgcttttccactaagatatcacaattactataattcaacccactggaaaaaaaatgacaagtgggattggctcagtagttaaaagtattttctgctcttatagaactgaactacctgagtttggttcccagcacccatgttggatggctcataaccatctgtaactccagctccaagggatctgatgctctcttatgatatctgtgagcacccacaatcatgtgggatatattcacatagacacatatacatagattaaagcaaaacaaataaaaaactgataaagttaaagatttttcttcctatatattatcaaaaaaaaaaaacccaaatcagcttttgaattggttcttagtgaatccaagaaacaaaacaaagataattcagattgtactgtataaacattatgtctcctaggaagtaaccttacagcatcattattcgaagaaaatgtgctttactaaaaaactataaaaagtttaaacctattaataccaaactcttccttttcaattttatcagaacaaaactaaacgtgtttaaattgctgagactcagcaagttcatttagccacagaaaacacacttccaagctacagcagtcacctacaaatgaaggaaagcagctgaagccttgtgattgagcctggaaaccaagcacaggtaacatacttacttacttagatgcaatggccagattttaaggaatgagacagaatttctgcctttcctttttcccttagacatcctgggagtctctatcaaatactttcttttcattgactagttgttgggtacctcaacacacgggccctcctatataggggaagcgaagggaagacacctgtgcacttttgtgctcaaggaacacattaaacatgaaggaaggcagaacaatgtgccaggaaggggcagtaagaaatgcctacaggggttagccagaacccaggcagagtggcaaattccctagtattggagctgggggtagtgccagtctctgtgcattcatcatttcctaaagttccctctagtgaaacagaaaaccacagaggctattctcatgggtactttaaatggtacatctgttggcaaaacacaaatgttgttaaacaaatatgaagttacagattgcacaggcacctgatagcctttaaaattcatgtctcttgttttgcaaagctgaactgagaaactgtgctgttaaatcatacacttatatttaaaaggaggaagaatgtgtggatgctacttagattctcattgatttattttgctttgggtgactacaactccccccaaaataaccccaaactcacatattttcccttttctgtgcacctctgacaggtttgattagctcatgaatagttggccacccaaaagttgatgaactaatagcagtgcaggctgttttattctgtccagcttattttaagacaaaaaccttagggcaaagtcccaatgcagaactattcatctgctaagtagttatgtctgagtctaggtactagagatatgtagcagtatctgtatactccaatcctctgtcttcatggggcttagactgtagtatggggaggagagtacaaacaaaaatattcagcttgtagcagatgtcgacaaatatcaggattggcagtgaaggggtggagaaagaagactttgacctagaagaacgtggccagagagggtcatagtagaagtgatccttgaatagacttgaaaaaaaccccggggctggtgagatggctcagtagttaagagccccgacctgctcttccaacggtcctgagttcaaatcccagcaaccacatggtggctcacaaccacccataacgaaatctgatgccatcttctggagtgtctgaagacagccacagtgtacttacatataataaataaataaacaaataattaaaaaaaaaaagccgggtgtggcggcgcacacctttaatcccagcactcgggaggcagaggcaggaggatttctgagttcgaggccagcctggtctacaaagtgagttccaggacagccagagctagacagagaaaccctgtctcgaaaaaccaaaaaaaaaaaaagaaaaaaaccccacaagctatatgtgtgataccaggaacagaagacagcgcggggtgtgtgtgtgtgtgtgtgtgtgtgtgtgtgtgtgtgtgtgtgtgtgtgtgtgtgtgtcaaggacctaaaacagattcttttctttatcaaacagggatgtgtcagggtggatccaggaagcccttgttactttcctgaccctgatgcagcagatgaatgactacattagacaccagccattgttctagctaaatgcttgggacatatcatgaatcaagtggacagctctgccttaaagtagcatatgctacaatgggctgatagtccaagtaagcactgtcagctacatagtgttaaaaaatgacaaaagctatggttggaggaaaagaagcccagtcatggtaggctccatgagaaggtagagattcatgcagatactcagaaaggcactgacttctatagacattagatcaaatggtgctgaaatgtcctagaaaaggatcagcaaaactggaactgtattgaacaatatgaaggtcattattgatgaacccttactgtgtagcatgccctagctttggcagcaaagagcttaggaaagtatggagagagacatagtgtcactggaaaggaaaagggaagtggtgaagctagaagggagcaggagccagaaacagtgccactgaggtggaagaagtaggaacagatttctagggaactgggaggagggcctgatatcagagagctctagagacacatcttgaaacagaagcaagagtgcagagctgggtctctcacatcataagggagaatgtttgagagcatgagggtgcaatgctagtctgtgggcattctctttggactgtttccctgctctctggaaactaacacagcagttaccagacaagagtgggtatgacagcctgttataaatgataggaagtatcccttttccccaactttacttcttcactctttggccaaagccttgaccctgagctgatggatccaattcctgagaggtgactgaactatgagagctctgatggattcataacttgacaacattactgggaggcagaagaaatgttattaggtatgatctagctagaagaattaggtcactgagggcatgtcttggagagatgtattttgtcctctactcggagctttcccctgcctcctggccactgtgaagaagagcttctctaacaatcttctatcaccacaggtccagaaacaatggagccaactgactatgaagggagactttggaaagtgagccaaaatacaatcctcctttaagttttcctcatatatttgtcatagtgctgtatagacagacatggccaaaggagatggaacaaatagagacacggggaactggagtatacctgtcaaagaaaggtgaacatgaggttcatctggagtgtattaaagagtaatcatattcattgtgtgtagagcagacaagggagataactgaacttcgccaaagctggtgctttattgaccaagtacaaacaaatgaccatggcattgaaactggggagatgagtgggaggtatggtcagattaaagatgcaagcaaatatgaattataagtatccccaaggtaatgagcatattggaattggacattacaggcagtaaacttgaaacacaaaagaggatctctgcttttgcagatacaagatttgaaagcgagtgcaatggctcagcaggtaaaacacttagtgtgatacacatgcatgtatgcatatacaaaataaaatgaagtgaaaagaaaaaaataacatgaactgggctaaattttctgatacttgaactagcactagtcactatgaatgcttgagaaagaatataaagatgtggttaatacagagcaaatgcagattttaaaagcctttgacagggacagaaggaaagcttagggtaacagtacttgttgctcttgcagaagacccagactcgggtgggtaggggattgggggtgggtgggtatgggggacttttggtatagcattggaaatgtaaatgagctaaatacctaatacaaaatggaaaaaaaagacccagactcaatttccagcacccatatggtagattataagtatctattaactccagcttcaggggatcctatgccttcttttttggatctccacaggcactattctcagacatggtacacatacatatgttaggtcttaggtagtctatgcctagaaatgagctcagaatggattatagacagatttctggtgattagctaaaacccagcattcctaaggaacttgtgaaataggttctcatcctccccccacaaaggagtaactctcttgtgtgttgctttatataagaatagctttcatgggctcatatatttgaatgcttagtcaccaggaagtgatactacttgagagggattatgaggtgtaattgttggaagatatggccttattggagggagtttgtagctgggggtaggtaggcttttaggtttaaaaagcccaggcaaggcctcctagtctcacttggcccatagatcaggatgtagcttttaactactttttcagcactacacatgcctgcagccatgcttcctgccaccataataatggactaagattctgaaactgcaagcaagctcccaattagatgcttttctgtgtaagagtcatggtatctcttcacagcaagaaaataatgactaatatgatttgtctcagtggagagccatgccctttctgctagaggctaactgtttaagtgtatttgcaacctggcccgtcaccctaagaaatttaagtgcagacatcccaaaaggaagaaatctccaacaaagaccgtaagagacctacaaactatcaagaaaggtatacttagcaaacttcctctatgtgaagctcatcttttctggcctctgagggttaactagactgcttcctcctaaactggagtctgtcaacctgccctgccctccacagaactcctgcctccagactccctttgtagagagaccatgtagactccatactccaaccccagaggctcttcagggcaggattggaggctcagagaatcagtatcatatagactccaattctgtccctagagaaagcagaaaatattttagagaaatcccacaagagaatcatatacaacgaggaaacatgataaaagtgttcagaaattaaaaataggttaggtacaacacatgtgctgtacagtgttttccagtatgccatcatttcccagaagagaagtctataatgacccaaaagtccattcacaggaactgccaggctgaaaaagtgctgcctcacctatacaagggagttggcaatgggaagaatgaaaatatagcttcttaaagcccgaagaaaagatcactatgctgatggggtgtgggaagaataagtgaaaataaactggaaaaaaaactgagcacagtgttcacccatcaatcaatcaatcaatcaatcagattatcttcctttaattttggaggttgaacttagagtcttatacattttttaaaaaaaagattttattttattattatatctaagtacattgtagctgtcttcagacacaccaaaagagggcgtcagatctcattacgggtggttgtgagccaccatgtggttgctggaatttgaactcaggacctttggaagagcagccagtgctcttaactgctgagccatctcttcagccttcttatacatttttaatgcatcacaaaaatcacttcattcctgtcctggctagttttaatgtcagcttgattcaagctagagtcatctgagaggagggaactcattaagaaaatacctcccagctgggcgtggtggcccacgcctttaatcccagcacttgggaggcagaggaaggcggatttctgagtttgaggccagcctggtctacagagtgagttccaggacagccagggctacacagagaaaccctgtctcaaaaaataaaaaacaaacaaacaaaaaacaaaaccaaaaaccaaaaaaacctccctaagatccagagaagggcattttcttaattagtgattgatggggaaggaccagcccattgtaggttgtgtcattcattcctgggctggtggttctgggttctataaggaagcagcaggctgagcaagccaggaggagcaagccaataaacagcacccactcaaggcctctgaatcagctcctgcctccaggttcttgccctgtctcagtttctgtcctagcttcctttgatgatagatgtgtggatatgaactaaataaacaccttcttccccaagtttctttttggtcgtggggtttcattttagcaacagaaaccctaagacaatccacaaacactttagcattcatgtcattatttaatgctgaaatttttattttcattttaagttaaaacttaaactcactgaggtgtataaaaatcaagtgtaccatctaatgacttttgctaagtgtatgcagctgtgtaacagacactcctaccaagacataagacaaacacaacaatgggaagttccctggcatctttcttgccacccctactcaatattatcagcaacatttggtgttgtcagggattttttttttttttttttggtttttcgagacagggtttctctgtgtagtcctggctgtcctggaactcactctgtagaccaggctggcctcgaaatcagaaatccacctgcctctgcctcccaagtgctgggagtaaaggcgtgcgccatcactgcccagctgttgtcagggatttttgtttgggaatcaaacctatagtatcacacatgtcaggccagcactctaccactaagcaaaaaagcccagcccttattatcagtttttaattttgatcattccagtggaggtacagaggcatttcagtgtgcttataatctacatttcactaattcctatgttatgattcaaatatattcctttcatgaagtatccattacgttttccttaactgtttgccacatttgccatgcaggtaagcaatgaggataagagttcagattccccgaagctcacataaaatgccaggtgggtgtggtagaagaaggtgtgtgatactgccacctggccatgttttattgttttaaaattttacttaaagctgttaattttccttctaagtgatattttgtgcatatcccacaaatcttacattatcttttctaatttttgtgttttttcctgactcatgagtaacttaggaatgtgttaattttcaaatatctgaggctttttctatgtcttatagttacaattcgcaatttaatttcactctgattagagaatacaatcaaaattcaaattaataagacttgttttacagtccagtaaagaataaggtctttacctttattaccctttggtaataatgggtactctgtagtcaatgaatttattactctgtaaactgtaattagattaagggtgactggtaatgttaagaccttttatatgctcactgaatttttctcgcagttctaccaattaccaagatgggaattaaaattcccaagcagaattattgtgggtttatatactttctttaatcttcataattttcttccatttttgtagctctgtacttgaacatatatacattcataaatgttaatgtcttcataataaattgacccttatcattttaaaacacatccttttttttcagtactggtattgaaccagggcttagcacatgctaaggaagtgtcctaccatattcccagctcttaaaatatgtcttgttatctatgttaactaagtctacttttttcatattattattgtcaccccaacattcctttacttgtggatagcattacactttaaatctcattttgtcatattaaaattatcttgaggctggagagatgactcagcagttaagagtttgtccagctcttccgaaggattcagttcagttcccaatatccatattgggtggcttgtaactacctataccttatttttttcttcctttaagataaggtctcactatgtatacctgactgccctggaacccaatacgtagactaggttggccttgaattcagagagccacttgactctgcctcctgagtgctggtattaaaactacatgcatcaccttgtctggccttgggtcttgctttttaatgtactctataatctgcttcttgccagaaatgttcagtctatttatgcttaatgtgactggtaatatgaatggatctagaactactgatttgttccatcattgcagacatggtttactttttcttttatgtcttgataatagctactctgaaatctttctctgctgattccagtatctcggctgtcttggggtgggtctcaatgactatattttcttttgaacaaaggtgagcagaatatggcctacaggcttaattggacccagtgactttttttgtaaaattattttttttgctacagctatatccatgcttttgcatctacaatagtgagttgtgtaagctgcaacaaatcaaatgagctaaaaataactgtttatgggaaaaatgttgactcctgcttgagtaacagttacatttcccctttttttcttgcctaaacatagatgcactttcctattctacagaaatgtgttatattctaataaagaagtctgatttctattttcttgtcacatctgtgtatgatgtacatgtgtgtattggtgtctgcatgggtttgagtgtgtgtatgcaattgtgtaacggtctaaggttgatgctgggaaccgtcctccattgctctcctaccttattcattgaggcaaggtctcttgataaaaatccagaacccatggatatagctaatctggctattctgtcttcccagtctgagataaccagcagccatacccacctggcctttacatgggtataggagaactcaaagcactttaaatactaaactatctctccagcccaagcattctagtttttaaattttagtagttatcgtggttcaactcatacttcaaactgtcttaccttggtaggcaacaaagagctgagactcttcagtttttctgccttacctaaagtttggtggagtctatgtgaaggaagaattggagcctcttgcttctggctgattcctaccctcagatcctaagaatggtagctactctgaattctgatttctcaatccaagactctgtgcttctatccaagaaagcttgtctgatgagtgaatactgactggacagttatcatgtaagtagtcaatataaagagaaaattcattccaatgaagtttccttcttcaaatgatccacttggcatcagcttctgtgtgtttctgattattctccagtgccctaagtagttattttaaatttctgtgacttttttttttgagatagaacctcatgtatctcaggctgcccttgaatttattagggtagctaaggacaagcctaaacttcagatccttttgcctctatctcctgtgtaccatgatgatacctatgtatcactgtacctagtgtgatggccattcttggttgtcaacttgactatatctagaaataatcaaaacccaagaccctctgtacatatgtgaaggattttttaaataagttatttgaagtaggaagacctacttgttatgttttataaaaaaaataaagaggaaggaatatgtttggtagaggcgaggtatggtgtggggtaagaccttgcctctgtgggcccacgctgaggcattccttctcttgaaggacctggaataagatagaatagtttattcaggcactggggaggggaattgagagaaaggcagggggtagtagaggctggccatgagcacgtggagagggaggagaggaatgggaagatagggggagcagaagcaagaggagagagcaagagagagaggagggggcaagcagcctcttttatagtgagtcaggcacacctggctgttgccaggtaactggaacagagcctagactaaatgtcaacactacttgtaatctgtattttttgaggtttagggaagatccacctttagtctggccccactttctgttagctgcctatataaagaacaggaaagaaggaaacttaactctctttactgtttgctttctctctgtggctggcaagtccattccttcactggcattaaacttacttctatggaattctgcataaactaataaccagtggagaaacatcaagtgtcatggatttaacaactactggattcttggaacttctgttggtaaacagccattgttggaccagcaagaccagtctgtaagacattctaataaattttatacacacatacatatacatgtgtgtgtgtgtgtgtgtgtgtatgtatatgcatatatatatatgaatatgagttttgagtatttgtttaaaaaaaagtagagcaaaatgggctactttgccactaactctcaagagtttacctcaaaaaaaaaaaaaaaaaaaaaaaagagttaatctcatccgagtaagtagtttaagtagtttctccaccctcagcagaagatgtactcccaaccccaaaacctgaattattgcattttctgcctttgactgtgaaaattgatccttcactgactgctaaaccagcagtgatttttctctgaagaaaatactgataatactatgtccttcagggcccaccaatagttgcctctagacctataagtaaactaaggggtaagtaggctcctaaaggggagacagaaagtgtactccatgaggaggtgtactacactactaaagaacttaatgtgtttgctaattcatccaagcagaattctgggaaatatgtgtaggaatggattctaggggtgtgggttaataggtcaggcagcatttactgatttggggaccatcaagtgaagattctaggttagatatggaagactgcacagttagatttgtcaaaagatggcctactgaaaaaggagttgggagatgcctgatatcccttggcttagcattgatgacgggattttaaggttcagggaatttgcaatgctagagtgggtatgctatgtaaaacctaatccttcataatgggaaggcccagaagatatacacttcactgatcctataagacaaaaaatggagagaggggtacaacacatctgaagagctttgttgttgcccatttccttatgccagatcttcaggttagagacattgttgctcatttggattaattaaatgtggtgggtttaattgggccccaaagttgtagggaccagatgggagcactgaattgccaaaggtaaagtgatcatagttatcataactggcagcatagacaccaaggtcagccttggtgaatggaagtccatgttgttgagcctaagcataacccccatctctcccaccatagccactttgctcatgtgtccattgagtaaggacagggatggctgtggaaagagactgactgcccacagaacagggcatactatctacttgcttgattattgagctcctcttctgctgaagtcaccttttgatgagcatttacatgggatacaatatcttcacatgcttccatttggagagatctatccacatctttctcacatggctttctcaccaattttccaatcatgttctttccaagttcctgactattgagtcagtccatcagctcaatccatgaatccactaacaatcacatatctggacatttctccttccaaacaaaatggatggccatgtgtactgccccgagttctgcccaccgtgaagatttctcttcactggggtctttcagggttgtcccagaaagggactgtaaagctgcagctgtccacttctgggtgctgcctgcataatgtgcagaaccatcagtaaaccaagtcctggtgtactcaggtgctaataatagattgatgttgtgcatgtcctactttatgacttggtgggtccatgatgggcaatttaggtcgaatggaaacttggtagtccattgtcaaatgttcagtttccactacagtccaatagcatgcccagagctgtctttcaaagggagagtgtttgtctgcagatgatggtagagccttgcatcgaattcccaaaggtctcttctgccaaagactggatccagacttcatctctatgtgccagtgatacacaagtaccatcaggtctgctagatcatatagtccaagtggtagagtagcctgctcaagcaatttggacctgttgaagagccttctattccagggcccactcaaagctagcagctttctgagttagttggtatatgggctggagcaacccacccaagtgaggagtatgctgtctctagaatccacataagcctaccaaaaatcggcttttacatggtgatggcagggacagatgcaataacttactcttttctttagaatgactatttctgcattcccacattatttgactcctaataatcttattgatgaaaaaggcccttggatttggttggatttatttcccattctcagatgcacatgtgtgttaccaacaagtccaaggtggttgctacctcctgctcactttgtccaaccaacatggtaaagtaatgtgtattttgtggaagagagagaagatcaaggtcccttcaaaataagttatgacacagggctggagagttaatatacctttgaggtaaaactaaaagtatattggcaaggtcagccaactgaaagcaaattgcttctggtagtctttatggacaggtaacaaaaaagggcatttgctctactaatatctgtataccatgttcaagcacttttcaagtccttggtggcactaatttctgcaattcccccagggatgtgttataatttttaactcattgttcccctggcagagacaactctaaaggctcccatttagcttttccaaccataatagccctcaatgcacagatcagggaaccaacgtgagaattttaccaacttttaagtatatctatcccaattgaggctggggaaataaccacaggatgaattcagggacctgctagacctattgtatgtcagacttcaccaaaactccataaattatttgacatccccaagcccttactttaactggaaggacatgatgcttcttggggtctccccaaatcagagtcagtatcaaggttcttccttgggataacttggccatcccttccttcagggagttctgggtctgcataccgtctcaagtctggaaattgggttgtggtacaagactcccttttgctaccatcaaatatataggctatgtttgaagttttttttcccacttatatagatcaaacaaaaattcaataggcttatctatttcatgtctagaaacaccatgactaagtaaattagacagtaccaaaagttcatacaagtcatgccactataaaactcactacagctgaatgtcagatctgccaacagcaagaccaacactgagccccaggtatggcaccattccttggggtgaccagccagcaacctggtggcaggctaactacattggaccacttcctccgtggaaagggcaatattttattcttactggagtagatactcttattctggtcatggatttgcctttcttacacgtaatgacaaaaccaccatccgtggacttacagaatgccttatctatcctcatggtatcccatacagtattgcttctgatcaaggaactcatttcacagccagagaagtgcaacagtgggcccatgatcatggaatctactggtcttaccatgtttctcaccatcctaaagcagctggtctgatagaaagatggcatggcttttgaagatgcagtcacagcgccaactaagtggcagcagcacggaagtcagcaaccaatatatggtatggtatctcccatacccaggatccacaggtacagaaatgaaggggtgggtaaaaggaatagttccactcactattccccctagtggcctactagaaaaattttttgcttcttgttcccatgacattaagttctgctgacctagaagttttggttcctgagtcaggagcgctcctgcctaaagacgtaagaaatagttcattaaactagaagttcaaacttccctctggccattttgggtttctgatgcccttaaactaatagctaagaaaggactaacagtgttaggaagagtgactggttaccaagagggattggactgtttctccacaatggagttaataaagattgtctcaagtgctaaagatccttgagagcatctcttggagctacagtgccccgtgtttaaagccaatggcaaagtataacacctaatgcaggcaggatgataaagggtacagacccttcaagaatgaaggtatgggtcacacctccaagaagagagacctgatgagttcttaacaagggttcaggaactacagaatgggtagtagaggaaggaagctataaatataaggccacatgacagttccagaaattagaattataactgaccttagtgtttctgtcaaattttgttaaaatgtctttgtatatttgcattttctttcctttatttctttatcatgtaatgcaacatcaattaagagaatattagtggttatacttaagtttgagatactaaaagagtatctctcaagggacattgccacctattcaaaaatttataatgcatttggggttgcagaagggatagttatgttagaattatgacctggttattgttttcatttggaaattaagcatgacttaaggagacatgactgaatgtcacattgataagaggtggacaggtggacttgtggtcgatcttcttggttgtcaacttgactacatctatgattaagcagctgggcgtaactgtgttttttttttcataattttatcatttaaagtggaaagagacaccattaatccatatctttgaggtggaaagatacacctttattctgggccacaccttctgctggctgcttatataaagaacatggaagaaggaagcttactctctttgactgctcgtcccccctctggctggcaagtccattctttcactggtattagaacttacttctatgagattctggcatatactaatgaccagtggagacatcaagtctcatggactgaacaactactggattcttggaccttctgttggtagacagccattgctgaactagcaggaccacagtctgttaagacatactaatatatatatatatatatatatatatgtgtgtgtgtgtgtgtgtgtgtgtgtgtgtgtgtgtgtgtgtatgtgtgtgtgtgtgtatgtatgtatgtatgtatgtatgtatgttgtatcagagtttttgtaagaaaagtagagcaaacgagttactctgccattaacaaaagcaaacactccacatgatttgttttaaaacagggtcttactatgtagtcctggagcatactatatagaccagggtaatcacatattcacagagatccttcagcctctgtgtctcgagttttgggattaaaggcctgtatcaccacaggccaggcaggtatagcaggtaatttttatgcatatatcctgactttacatcggtagtaagatttctaacagaaaaaaaaaaaaacctgatgcatcaacttttgttaatactgctattagttttataattttatatttttattttatatatgaatgttttacatgtctgtctatgcatctatcacatgagtacttgaagctggcaggggtggatttggatccactgaaactggagttacagatagttgtgagccaccttgtggatgctaggaacagaattaggtcttctgcaagagcagtaagtactcttcatcactgagccatctcttctgtcccttgtaattattttatacatattacaaaacaaagccagtaagtgtgaatattagcattgttagaaatcaacattttcagtgaagaaaaaaaatatgggcataagttaaagactactgaaagctaaaaactgtctttgaaaaaaatctctcacagttatgcccagctgcttaatcacagatgtagtcaagttgacaaccacaagtccacctcttatcaacgtgacattcagtcatatcttctttgatttcgttatacaatcatgatttttttaaaaaaattaaataattttcccagctttgctcacccaaagggtctagatgtgctgttaacccagtaaaaataaatcacatctggcatacacacttggggatctaaataccatttaccactataatgaaccagcgattcttgcagtcaattctgggaccaaaaaagcacatgttgggatgcaatatttggtgttagaaaacaagagaactgctcaaagactagttaataagagtgtgacaagagagcacaggcatcaatataaagagcttcttcaatgtccaaattcagaatgatttgatgacaaaacaatgactgtagctgaattctaaaatttctatttttttttttttggttttttgagacagggtttctctgtatagccctggctgttctggaactcactctgtagaccaggctggcctcgaactcagaaatccgcctgcctctgcctcccgagtgctgggattaaaggcatgcaccaccacgtccggcctaatttttttttttgagacaagttctctgtatagttttggcctggactcaaactcagagatccacctgcctttgcctcttgtgtgctgggattaaagatgtgtcaccatagactggctgaattctaaaatttctaataaataaaacttcaggagtccatcaacatgaaaaacgtatcaacaaatatgttgtcactaataatcactaattctactttgaaatttagtaatcaatccagtaaaaatctgtaccttttgggggagaaatagttcctccttacggataattctttacagagggatggcaactgggagatgacagaattagataaaccataattttgcagcacatagtaaaataatggattcaggtaagaattatgaatgaatgctaaagtcatcaagtgaatacctgttagaaacaaagatatttgtatggtgcttaaaccatgtagattatttgttggttacaacagaaaaattgtacatactccaataaatggaaattaaaaaaatattgagaagtcaggtggtggtggcacacacctttaaatcccagcacccagggaggaagaggtaggcagatctctgaattccaggctagccaagcctacaaagagagttccagaaaagttgatacaggagcaacccaaggttccaaaattaaaaagaaaagaacagaatatatatctctttttttttattttatgtgcaggactgtcctgcctccaagtaattgtgccccatgtattcagtgctcatggaggacagcagaggacattagatcttcctggaactggagttacagacagctgcgggtgctgggaatagaacctgggccctctacaagagcaacaagtgctctcaactactaagccatccatctgtctggcccaagaagttaagattttaaaaagacaacaatagacaaaactattctgactgagcaatctctagaacaatgaaatgaaagacacagtccctttaaatttcagaacacagaggataaagagaatattctaaaaatctagggaaggaaaaacaaaaggaggtcacttatatgagacctaaaataagccagactcagaaagacaaaaacctagcatggtgatcctatccataaaataaaatagtactataaaatagtactataaaaatcttattgcctaaaatcagtgcttgggccactatagacatttcactccattgtcagatgaatgaatgatagtaacttaatgtactgcatatgcttcagcatggaatatgcaaaaagttcattatgtaaaaaataagtgtcagtataaccaagagacctaggtttataaggatgtcaatgaggatgctgtttgacatgtcatccaaagaactgctgtatccatctgagaggcgattcgtggcttggactgagatcttggcagtggaaatgatgagaagcagcttgactcatatgaagtgctattaaaagatggtgaaagaaagagcagaatcaagactgactctttgaatctggattaactggttagatattggtattatttcctaaaatggagtaaagagcagatggaacaaggttaaagaggaagttaagaattatgtttaggactttaagtttaatgggcaactcaagtatatctaaagaactcattacatttgagacttcggaaggtttgggtacaggtagaggtggttccactggcttgctgatacatcatcatttcagagtaatgaaaaggcagaaacaatagaaatgtcacttactgatggcacagtcttgacaagttataaaatgacattgaaatgatatgtggggaccaaaaatagtactataaaaatcttattcagctgttagctaccaatctatggcaaatttatggacaatatctacttttcctctttctatattttatgaaaccttttctatcaagtgcatattatttttatttttggaggcaggaggaccacaagttcaaatacactattatttttagagtaagaaatgcagttgagcttctctttattttagtggaaagagttcacgccatctattttactgctgtgcagaggtatgttaaggaaaaaaggcagattacatgttagatgagctcactccctaaaatgttatgtatgcaggaaggaaaaggaaaactagaagaaagtttaaaatgccaatagcacttgtgatcagaactcaagagacggaggcagaaagattgcaagtttgaggtcagcctgtgcaacacattgagatgtttcaaagaaagaaaggaaaaacaacaaaaatccacctaaaatgtcaatggcataggctattaatataaacttttaggctattaaatattaagtcattgatgtggcattaagtactcaaaacagatttttggattgctgaggtggctcagcaggtaaatgtacttgtacacaacgcaggatagcaaaaacgattcacctagcagagaaagcccggcctcagccttggcataagtcagcaggagggacctggagggacgccaggagaagttctcagctgtgcctctcagcgaagatgtgagaccaacaagtgtggcacaagtagctctgtctgtaagcaagccaagctcgggctccatcactgtccgtagagtcctatttataccctccacacatcacgtatccttcacatgtcttgcctcagcacatgcatctgtctcggctgacaccactctgccaatcattctgagtctgtggaagtagcaagacactgtagcacatcatcagaaggttttggtgcggttctctctatggagttccaacaaatgcagctcaactgtgtaacgtaaggtggaccaatacatgtgtgtcgtttgcaaagaatccttcatcacatgtcctttcatgtgcttgctttagcaaaacatcctttcttctgcgtccatttcaacaaaatgttccttcatgtgattgccccagtaaaacatcatccaaaacaactgactttccaaagaaaccttaagtttctacttcaacacagtgaggcactatctcaaaataaaaagatgaagctttaaatttcattttgtaaaaataaaaaccaaaaaatatttatttttaaattataattatgaagtaggggatagaagtaattaatacacacatgtgagtatgagtatccatagaagaaagaagaaagcatttggagccctctggagattgatttaaaggtagttggtgacccacctaacatggatgctgggaaccatacccaggcactctgcaagagtagtatgtgctatttaactgctgagccatctctccagttcctttgtctttttcgtatacctgtgcttttccctatataactgcttagttgggtactaataccaattgtagaaatatctaatatcaatctagggcttctatcctgcctttgatcatttagttcccagataaaagacacataacttttatgatttacaataagttttaatctgcactagagttgggcagctgtctaccctctatgttgttagaatttattttcctatagataactctgagttattatgtttactatgtttcatctgtgctgttcttaactccaattggccaactctcatgggtatgctttcttgactcctaactcatggtgtctttctcctctctccaccttcttctctctctccttgtggtctgctctgacccacaaggccaggaacaccaagccctgtctatctcaattctgcccagctataggctataggcatctctattcacaaatcagaaataacttgggggcaaggtcacatagcatcacttgggtctcttatctctgggacaaccaggtcttgggagcccacatttagcattacaatatacaataacagaccaaaccacaacagataccttaagttttaaaaaaagatttatttttaagtggtatagagtgaaaacactcatggacgctagagatgttggatctctctggagctagagttacaagttgttgtgagctacctaacatgggttctggggttcaaacttgggtcctctaataagagatatgggtgctcttgtaactgctaaaccatctttctggcccattgataacttattttacaagttttacttatttatgtgtatacccatgccatacagaagtgagaggttagcaggtagtgtcttcctctattgcgtcccagcttatttttttattattttaagggactattttatgtgcatgtctgtatgtacatgtatcatgaatatgcaggtggccaaggaggccagaagaaggtgacagatatcttggttctagagccacagttggttgtgagctgctatagatgctgggaactgaaccaagccctctgcaagagtagaaagcactcttaaccactgagtgttctattcagtatcctccaccttattttgagaaagtgtctctcaccaaacttgaacctcacagactgactagactagctagtcagagggcccctgggatcctattgctttcatctctgccatatctgtttgttggcgatcagaactcagattctcatgtgtgtatatgtatgtatgtatgtatgtatgtatgtgtgtgtgtgtgtgtgtgtatgtatgtatgtgtgtatatatatatatatatatatatatatatatatatatatatatatatatatatatatatgaatgaagcactttacccagtgattctaaagttttcttgaggtatttttcaaagtgactggtcatttaattatttatttatgatggggtcccaagtactgaccaaacccgacataattttttaaaagtttattgctgcatgggataataaacacaccatctaaatctccccaccctacctccaagatttcagtattgaactcaggatctcacaaatgccaggcaagcatcctaccaataagctatactttcagatgggtatttgtaaaccccccttttttggccaagaaccctttttgttttctgaattccttctcaggaaatgatttgaaatacataaaatatatagacactgatttatgacaaatttgtgctagaataaaatgcacttctttggtaaatcattaatcagatccaaaggtagaccaaagttacaaacaattatgaacacatatgacatttcaaatatctacaataaatatagtgtaagctgcaaagatttctattctctactggtgataatcacatactttcctggtagtagagatcaaatccagggccttacccatgctgaatatgtgctctaccactgagctacatgacaaagctagagctattcccaacagtactataaataatctattatctacaactgtcagtgaataacaatgaaatgtttcccccatcaaaggtcacaaacccctgagctaagactcaaagcccttaatctagaaatctaaaaagatattccttgtggtactgaggactaaattcaggtctatgaccatgttagcattccactactgagctacaaccttatctctgagcacatgaataacagtttcctttggtgaattatcagaatattttttacttttgttgttttgatttttaaaaataaggtagaatggctatctttgaagtcctggctgtcttggaattcactatgcagaccatgctggccttgaacttagagacccatcttgcctctacctccccagtcctggattcatgtcccaccaggctcagcaggatgtttttttttaacttttgatctttgtacctatatgcattttccaagtttcttactataatattccatttttataatgaaaaataaagagctctgctttgtggggtgatgtctataatctcagcagttgtggaggaaagagggtcagaagttcaaggtcatcctcagctatatagggagtttgagagaagtctgggatacatgacatgctacttaaaaaaaaaccaaagctcaaaaagcttaaaagtatcatatttttgtttgttttatattaatctggaagaacatctaagaaatattatacaagtacttataagcgacattaacattttaaaacacaccttcagggctagagttggctctggctaacaacactggcttctcttttagaggacccaggttcaattcccagcacccacacggtgactcaaaattgtctgaaacttacttctggcttcctcaaggaaccaagcatgtattctgtgtacagatacacaggcaggcaaaacacccatatacataaaaaatattaaaaaaatacaactttcaactgtcctaactacttggattttatcattcccatagttttactagcctaaaaaaaaaaatcactatatctatttatcttggaatttaaaagaacaaacaaaagccaaactgtcacaacttgcagacgtttgtctaatttttttgccaagaataattccaaaaacagctaaaaatattagagcaaattagttcttaatatgctctaataccttctgctgtttacaaaaacacaaaacctagaaacacatggaaccatatattttaaaaataaattaccaaatgtgtgtaggaaaaattagaatacaacacatcaaagcaatgctaatacatacctcaagcaatgtatttttcccttagtagtttggtatacttaatctgttcatttataaggtacaaactaatgaagatataggattatcaggaactggacaaagatgaacaactgtcaattattaggcaagtaagcataaatatatattagtataaactgttcaaatcatttataaaaatgcatcagctatggccccaggttagaggagaataccaaggtattattagaagcctcaagcaagccaaaaagtatttcaagattttcaaaattgacttacatggagaaaattaagattgcgctgccaaagtattaaattcatggtttagtagaaatacagaggttacaaaggagacaaggaggaaagtctagacatagatgcaatttttgtgtgtgtgtggaaagattttataaacatagaaatgtaacaacttctggttaacaagaccaaaggatacaaacataaagcaaataccaatccttgcttctatctaatctattctcagtgaaaactctggttagatttctgttacaaaaatgtttccatagcaaaaggaaacacaaatgaagaaggtctgcaaagatcaatataaccatactttaaaaaagaaaggagttgcatacaatagcatcctgcactgtagaatatgctatatgtacaacacaaccttgcagggaatgtaatgtgtcctgatcaactttagtagactagctactttagggaggcagggaaattaccatgagttggagtttagctgggactgtttctgggttctacagaaggaggctggcatgaatacgcatgcagattgctaacacttatgtttgggtcaaaaagtatgtaagtagctaccacatgtgggtagggtacaagggctaaaaagactgggaaaacaaccacagaatgacctagggagaacagaagagcaaaaagttcagaggatctggagaaggttctagtttcagtccctgaggtcaggttgggagaattagaggactgctgttaacattggctcatcaggatagacctagtccatgacaggaaagaaacaagtttgttcatacacttcctttactatcaaagtcttgttcaaaaaaataataaagcctactatggtaacacacactttttttttgtttttgttttttgtttttcgagacagggtttctccgtgtagccctggctgtcttcaaactcagaaatccgcctgcctctgcctcccgagtgctgggattaaaggcatgcgccaccacgcctggattgtgacacacacttctaatctaagcacttgtgaagtagaggtaggatgactatgactagtaatttaagactagcctcagctacatagtgatcttaaggctagcctgtgctatatgatactgtctcaaaaaaaaaaaaaaaaaccaaataactgggcatagtggttcccaccagtaagtaatcccagcacttggaaaccagaaggagaaagactgctgcaaattctaggccagccagtgctatacagcataactctgtctcaaaaacaaaaatatacacacattaaaaaaaaaactgatggaaatcagtaagggtttaaggctgcaggtatgacttagtggtaaagtattttcatagaataaaaaaatatcaagagaagtatcatttaataccaaagatagcttttgctcctgtacaagctctggactacctcataggctggcactattgagtgttactatggtaatagagaataatgttaatagagaatatgttggaaggagaagccctgtcctacttaagtgtctaccaatctcctgggacaaaagtatggaggggaaggaggttctgtaaggagatctataatgggaaccctggagctccaataggtagaatgggaaggttacagaaattgtccttagagtaagtacagaataaattcattgtggaaatagtacaggataaatggacagagcactgcttggtaactctgaggataagagtagtatcttaagagtatgctgtatcttggcttgtgtgactagtatacagctgcctgaacatcatactacatgccccaaaacgtaagagctcccatcttcaggccccagctgactatgcacacctgcctatgtctgtgtactgagccagacacatattctttcctgcctcagctaccaggcattcttgtctatttttaagactcatcatctttttctactgatgctttctcctggactcagctaaagtttccttactgtgcagatgctgactgccatttaagaaaaagacaactaaactgttctctgcctccatcccataaatctaacttttttttgcttttttttgcgacagggtttctctgtgtagccctgcctgtcttggaactcactctgtagaccaggctggcctcgaactcagaaatccacctgtctctacctctcaagtgctgggattaaaggcatgcaccaccaccgcccagctaaatctaacattttatgtgctctctcagtggcagacactcttcacaatcataattgtctaccccttggaaaatcagagcccatttgcccatccgtacctacattaggccagggtaaggacagtcccagtagttagcacacataacagatgctcgatcagtagagatcacatgaataaagtactgctatatacactacaacattcataaataaataaagcaacagcaacttggtcccaaatacttacaggatattctttgtgcaaattaaaacaggatgtaggcagaaggtccagcatctgagggatactctccagccaagaatccaaaggagctaccacaacttagaatggtccaaaataaaaaaccatttgattttcttcaagattcataaataggaactagctgaaattcccctcatcaagtaaaatgtcttgcctgaaatgccctgcttacacaagatcatattttatgaaatggaagcctccaaagtttggtttctagtgctaactgctaaaaacaacttcctcctagcccaactacactctaatctctaaaaatagtactgtagtcataaattcgtgtatttatctatttatagttttccccctaaaagtctacaactaaatggctacccctttgttcagaaatactttgaaaatttaaaatgtatatatcctttgatctagcaagttccacttctagaactctatcttacagataaacttgcctctgagctaaatacaggaaaaaatgtatagtatagtggtttgaataggtttgagcactatagatttatttgtttcaatgcttggccttatggagtggctctattagaaggcagggttttattgaagtaggtgtggccttgctggaagaagtaacatcactgtgtaagcaggctttgagatctcttatactcaagctctgcccaatgtggaatgagtctcttcctggttgccttctaatcaatatgtagaactcttcttgactccttctccagcaccatgtctacctgtaggctgccatgcttcctgccatgattataacaaactaaacctctgaaactgtaagccagctccaattaaatgttttcctgtataagagctgtcatggtcatggtgaccatgcaataagccctatttaacagcaataaaaccctaactaacacatagagcatcaacattttgaggtagataaggtttttctatgtagctctgaatggtcggaacaggttggcctcaaatctgcaataatcctattgcttatgcctcccaagtattggaattaaaggtatgtgccaccataccatggtaggataaatgacattttgacaattagaaacacaaacatccattaatagaaaatcaaatgtattatagcataccccataaatagactattttatttcatcagttaaaaagaatgatatggttctgtataaactaattccagataatcgccaagatacattaactagaaggcaagctttgcaactatgtgccatattttatggttcaagtaaaagatatactcccacatactttttgtatatgtgtaaacatacaaaatacataaaatgcacatgcataaacattcagagtaaggcactagacggtattgacagccagtaggagagtgttttagcaaaggatagggatgaagcaagaagcgaaaattagtcttcagtgagcatagaactgcagcattataaaagaaaagagatctggatgtggaaggcaataataataatttgaaaactgaatgacaagtttaccaaagtcaaactcaagcatactccggaaatcatcccatctcaaagttaaatataaaaaccagtatttgggaaaacacagggcaatcttaaggggaaacaggtaacatatgacatgaaactagagaaggggtggtggtggttctgtagtgaggaccagaaggataaggcaggagaacaggaaaaggaatggggaagaatgagcaacagaacagagtatatatgaaaataccataataagaccatcatttttataagctaactttaaaaactacctaagggctgcatgccactaagcctaatgatccattagcctaacacacacacacacacacacacacacacacacacaattttaaaaaccaatttaagggctggtgagatagctcagcagttaagagcactgactgctcttctggaggtcctgagttcaaatcccagcaaccacatggtggctcacaaccatctgtaatgagatctgaagacagctatagtgtacttacatataataaataaataaaatcttaaaaaaaaacaacttaaaaaggaatgtggacaaacaggaacttatgatacattaaatatgtatacattgaaaatacatcaatcttttcagaaaaaaaatggaagtatcaactaactcctagaagaaaaagattttcctgtataaaaaattaattttatgtgttttgtatggtgtaagtttatgtaccacatgcatgtgtgatgcctgtggaggccagaagagggcactggatctcatggaacaagagttacgtacccttgtgagttctggaaactaaatccaggccctttgcaagagcagcaagtgttcctatgttcttaaccactaaacagtatctccagcctccagaaaacactttctaggagcaaatgaaatcttaatttttttttaagtgtccatgttacatgtgtgctacagtctaaagatagcttgttggagtcaacaacttcgaggagttggttctctctttccactatatggcttctggagatcaaatttaggtcactagacttgatggaagcatctttaacccactaagctaatcactgggctgcctgagattttatataatagaaggacaaacaggttaggtattcagttcagtagatctagaaagtatagctcctggcttcttacagacccacttaaaaagaagtatcttgggggctgaagagatggcttagaagtcaagatcacttgtgactctggtagaggacctgtgtttggtttcttaacagtcatgtgaggtagcttacaactgtccataactataactccaagaggatctaccactggcctctgtaggtgcctgaactcatatgcacccctcatcttccgcgtgagccccacagacacagaaaaagaattaaacacacacacatacacacacacacacacaaagaattaaaaattaataaaaaatatcctgatggaataataaatacagaacatgaacatatagttcacataggccagatacaaatggccaataattactgagatacagctcagtaataacaaaaagaacactgatttaaaaaataggtatctaattatgaagtcccaagaatttcagaaaggtgatacctaccagtacctccaagtctaggtagccattcttcaaaatgactagctgatgaagaagttctaatttaaagtttatagggtttttttttttttgatacaaggtcttgctatgtagccttggctagcctgaaacttgctatgtaaactaagctggcctcatgctcacaaaaatccatctacctatctctgtgtcccaagtgctgggattaaagttgtacaccaccatgcttggctttttcttttcctttttttttttaattaagaagaaaagatatacatttttctagaaaaaagttgtattgtttgacctgaaatggttgtttttctagagaaagcagccaaggagctgaaggggtctgcaactctataggtggaacaacaatacgagctaaccagtacccccagagctcatatctgtagctgcatatgtagtagatggcctagtcggccatcactgggaagagaggcccattggtcttgcaaattttacatgccccagtacaggggaacaccagggccaagaaatgggagtgggtgggtagggaatcagggcggagggagggtatagggaactttcgggatagcatttgaaatgtatataaagaaaatatctaataaaaataaataaataaaagaaaaaaaagactttttctaaaaaaaaaaaatccaccctttctctggagaaacatgtatagtatcattactgtctttttcccagagtcattcataaactgagaaaaagactttaaaaaccgcaaaccacgcccagcctaacatctacccatcagtgcttctattacatttagtagaattcttgagacaaagcactagccatataactcccaccagcataaatgtgtgaagcacaaagatcggtcaggtctggatcatacctcatgacagtgaggagaatgacaactgacgtcacagtatcagaagcagaatcaaatcttcattttcttctattctcctccacccaaaacttaccccccccccccataaatcagctatgtgtgtgtgtacatgtgtgttgcgtctgtacagtgtgtaatacatttagagatacagaaaatgctaactggggatctctgctacaatcaaaacacagcatgtgtgaacagtcaacattttcttttgtagaagataggaaaagtcaattggcattatctgttttatcacacagaaatacaggtgacaaactatcaaatgtagaataattactaatttaaaaaaagcttgagaggtttgagcctgataaaggataagaaattacagaacaagtcattcttgcaaaaactaaagtccacacaatggtaccgcagtagttcacagtacagatttgtcaggtctgaaaaacaactgggctttccagcttttcctgctctagaatcccgagagtcgcacatctgtctggatgcatccatcagaggtcagcaagcaagcaccactaaccacaggctccattgtgccgtgacactttcagaaaggtgctcttctaaggggaccacataccagttcctatatctgaaaatgcagcacaccactgcttgctaacatcgacctgcaagtcatttagcccaaaccaaatcaaagaaagcatcatgctgaagaccactaggtaagagcagcagcacaggtgaagagctcaggccaagcactctcctgcttcaaggtgaactgaagctgcagatcaccagttccagctctaatctgacacccaccccccagatcacactgtggctaccaagtaactctacccaaactgaactgaactttcagggctcagggaagtgacttttttttattatatggcacagtttggcccagttatattttttgtctttggggtactttcatactgtccaagaatagtatatctttttttccttttttttttttttaaaaacagatggccaaaccaggacatatactaaaaaaaaaaaaaggaaggttacttacctgagccctaacatcccagctaccatggaatcctgttggagctggtctacagaagcaaggtgtattctggggagtcacatgtcacatcaaagcaggaactggtgagtctgtatttttatggagcctaaaacaaagaaaatcgtaagttgaaagtccccattgagctgcaccttttcccaaggctttttggaacattctgaagataaacagacaacatactatgttacttcccagctcagctagttagaagcaaagaataaactgcaaattactgccacaaaacacagaatgctaaaataaagacaagagttatggctgtcagaagcgtcactatcagaggtccttacacctctggggaacactttggaactacagtgcacaccacaagtggtgacttctgcttaagtacttcttccaccacactatacaggaaaagtcaaggatagaatgtgttcaagagtatatgcaacatcaaaacaaaacaaccaactccccccccaccccaaaaaaaacaaaaaccaaccaaccaaaaaccaaaacaaacaaacaaaaaacccaaacacccacacatcacctcaaaaagaacacaaccaaatccagaggcaaaagtctctcttctgcttccagcagtcaaagctgcaaggaactgctctaacatcacaaaggggttttcaccctgagataaaagacaaaacaccaggagatccaaagccatcatccaaactataagtccttctctaaccaatttctgtaaccctctcaattcagtacatctcaatggctgtaacacagagttgatgatccttttgacctttttgttactgtttttctttaaaatttttgagattttatttatttttattttatgtgcatgagcatttgtctgaatgtatgtctgtgcactacccacatgtagtgcctgctgaggctagaagatgggtcctggggactggaattagaccattgtgagcctctatgaaggtagtggaagataaacaagtgctctaaacagctgagcgctctccctccccccattgttgtttttgaggcagtctcgttatgtagttcaggctgtcctcaaactcagttcttccggcttcagtctctcgtttttttttttttttgtttgttttttttttgcacacatgttcaaataaggctgttgccaccaagctaaccatcgtttcctagttaaagccttagctacctaaatacctaattttagatacctggctctcccagcaataacacttttatctttacactaaaagaaaagcttatactatacaacttaagtctattatagtcactcatggggttgaatccagaggaaaggcaacagcaaccaagtcctttgcagctgtatgctatttacctagacgatgcttacagttctcttttaaggctcagcaaaacctcttcatttctataatttccttaaatcatagaattaagtcatggaacagtttgaaatcccaaagttaattgttttttggatatcagcctaataaaaaaactcaaaccagtgccttgtttataagaaggcctgcaaagtcacaacttctcaagactagttttacctacctgcaattttatttatttatttttttgtaaggatggaactgaaatcagtgccttgagcatgtgaagcaaatgctctacactactgactgagccctatatcttcagcccttatttcactagaagctgaactcagctttattctaagctcttaaaaaagtttgagatttgatgaaaaaaaaagttaaaaatgaattcagttaggtgaaaatccaacaaaaatattcatactaaaataccccctgcttttaggaaaagataagcacacttttactaaggcttggccagtaacaagagtccagacatccatagtaccagctaggtgagcagacattcacatgctagcagtgtccaggaaaaggtcatatttccccctttaacatgggagtaggctcgtctgccttctcttgagtcttgccaccattcagacattccacacactatatttcccataaaagtgattgaaatcaaactttcaaaggaaaatgttccttgggagagaaaggcagaagagagctgtagaaagcagaagagcacacacacacaccttctgtataaactagccccagaagtagggagccactggactccctgaaatgatgagcaggtgcagcactctgattggacaacagcggagtgattaaaaatggctgtgatgggcactgaggacaatgtccttcccttggaagaacaatagtgttttctacccaactaaaaagattgtttctgttagccacatggcttgctgcacagatgttaccagagcaggtgattaaaatgagatattctgccacacttcctggaattctctagtctaggctgcgcttaaaaacactggctactagaaatgtcattgtccatcagtctatgcttcccagaagtagttcactggtggtaaactgctcttagccaattaaaacattccccaccgagtgacctgtttttgtggaactcccatcagagggagtggggagctctgtcacttttggcatccccttcctcctagtgggctgccttaatatgagggaaggtgactagtcttattgaaacttaatatgccatgctacattgatatgcctgggaggcctgccttttctaaagggaaaaggatgagtggatggggaaggagaagggaggagtgagggactgagaggagaggaggaagtggaaaatacagttgggatgcaatatatgagaataatgaataaaaaaaaagattctcactgacaattacctttagaaaagataacaggttccaggatatatcatttaccatgcaaacaaactaacacgtttacctctgctgctctttattttaggtttaaaaaaaaaaaaaacttctcaggagttcatgggtggagttggggcactggaacaagggtttagctgatttctccttaaactccatagctttgcctccctatccccaatagattaggcttcatagaagcagatcaggtagagtgaaccactctatctggaaaatacacagattgcaaaaacatatcataaccttccaaaatctttgtggtctatgtgtagtctttgtggtcatatgtacctcaggagtcaaacagcacaaaaaacagagtagaaggctaaggatgtggagtgattgcctagcatgcatgaggtcctgggtttgaccaccagtataacaataacaaaaaaaaaaaaggaaaaaaataatccttagagtacaatggacaacatgatgctttcttcttcagtgaaatagtgacctgttactgtagctttaaagtactcaagacacattctcatggaaagaaaataggcatatgtgatagatcaatactagcaagaaagccatacagtttcttcaaattcttaggacacactagcttcagatgtcaccaggcactttgaaaggaaactgtgttctagaagttgcttacgatgtttaaagagctatgggtacaacaaatagataaccagaggggcacctgaggaagcaaacctgttgtaagaatataaaaacaaagtaaaggttccaactctgagctcaggctcagatgtacaaaccttggaattttttgacaagcaagacttgggtgtgtttgtgaaagtgaatgcactctgtcggccatgtgtattaactcattttagatcatttgtacttttacagtgtttggactctttaaggttctgacatatccaggtaagaaaataaaagcaagtgtttcctaggctttctgagtatgacttgaatttgaagttaaaaacaaacgaaaaaccaaaagtctgtaaatatatttttccaaatccttggtggaaactccccaaggacctaacaatccaaattttatctttttatagagattcgacatatttcaaagaacctaagatatcagtttaatcatgttattaattgaaattgctgagattcacataattccaaccacaaacccaaaattctcctctacagtaataattacctattagtgaaattttactacccaggcccaaattggtttcatttatgtagtataacaaaatatctagaacttgtcctacaacatctcagtcacttagcactataaattagtccattctgtttcatgatcgtcatcaaccaccctgtatttgagcctactgcctcactgtaatgattccaaacagtggagtcaacatgcaaatgactcaacagagcccatttgtgttcctggaaaattaaccaagagtacatatctgcctgactatgagtcaggaatatcaaatttgtggtggagcccatttttgttttgatcaacctatacccgaacatacaaggaaccagcatagaggtatcccctaacaagctttgcccttcaggggtccatactgaacaatgtcataccagggtctctcttgtgagagggaatcttttttagactccatgatgactttaaacctttagtgcaaaacctcagaaacattgccactgccacataaaagtcacctgtgttttattttcagtgattcagccataaccaaactaaaaagagaatgaactttcaaagataagtgacaggagtcacagcgatgcgatgatctcgccccatttggtactggcgatcctgagcgctccaggacgaagagagcccgttacatacaacgtcccattccacttatgtaactggatgatcgctggcgaagggaggggagggagggtgggaagacgctcatattccgaagccacagcacagcatccccaaagaaccagagcaccctgcgggcatggtctcacggaagagcttcgagtgctgaggaacgcacagtcccttgcccacggttcctgatgagaactacaaccatctctttatgatgagttgtgggacctaggaacataatgtctagtcctttttgtgggtggacaataaccctcaacttgttcctgccaagtggggaatggagctgatggaccgactcgcttgcagtgggggcaaaaagtcacggaatgggagaggaggaggagggagcaaaacccagagatgggggtaagagctcaggagcccttgtggcgcactctcccaacgggagatggactgcgcacgcgcgccagtctgtgtgtgtgaggggggagcaagtaacgggagtgggggcgcgcgagggagaaggggacagcgcgatccagggagaggccgggaccgcgggcgcgcgacagtgccgaggcccaaagccccaagaagggcaggagcgcgcgcagccccaactggcgaagcccagacgacaagggcgcttgcacagctggggcctaggatgcgcacagatggggcgggcagcgggagggcgtcattcgaaggtggctccagggagatcgcgctgagaaccgtcgctcgcgattgcgggagacgagtggagaaagccaccaccggcggcagagggagggggagggtagagaggagggacgccatccgccagccgtgtcgcccgaccccgcgggcccctcccgcgccacgtcccgcccctacccgccccccagcaagggtccccgcccgcggccttggcggtcccactcacagtctctcctcctcgcctcctcctcctcctccgctcggcgcggcggcggcggcggcggtggcggcagcggcggccattttccggacgggttttaccacagccctctctccgagaggagggagcgcgcgcgcaaccgatgccgggaccccgcacggcagacgtcgcgccccgccctcccgaccagcctgtgtgctgctgcacctgcgcgcccgcgccccaccccttgctctttgtcgagattacccttcattggttgtggagcccaggctggggcggagccttagcggtgacgccctcaattggcaggagttcctgtctgtttaggcagggaaaagaggcggaccccattcagctgcggattggtggagttctactgtcacttggaaaaaagaggcggctagggcacagaggggctggttttgtgggcagcatttgaatgttgaggattaactgggcccttgtggactctggcgcttaaggaagtctaggctcttggcgcctattagagcctccctgctgagtagttcaccattgtgataagcatttgacttcaccagcatttctttattatcattttctgtagaagtagcaaagttgcctgttgaggagcctggcgttgttccaagccaagggacttgttttaaagggtctactgattgtattattacactaaattagcagatgtcgcactcttaaggctgacagtaaaatcaacatatcaaaccttggtctttgcagacgtttataatgggcagatggtgtgtgccaagcccataagagatcggtctgtcattgttgaatcagatggtttgatggaagtacgtataaaagggagtgaggccagagggagcattgtcaaagcagccttaccctgataccagtcagcatccaatgctctttgtgctaaacaaatgctcaacaagagactttctttctttgtttgttttttaaacactatgcaacaagagactttctgattcaaatttggctcccctctctattcatttatttgctaggcactgttttagtactgaacaaggagacaaactagactcctggtaaggaagagtcatactaaacatacaagaaagtagaacttaaaattttgcacagagataaagactttgaaatagatagggcaaggacaaaagaagtgctattatgataccctctagcttttgccctcatgtcgtctcccaatatgggtaattggggaaaacattctaggcaagtttaaacactctaaggaaggactatgcctgccttactaaggaggccagtgtgactggagagagacctaggccaccaaaagaactaggagattattttgagatgagaagcccttgataaatatttgagtcactagctgtcaccataaaacctatgttgccagtgaagaatgaagaactggctggtccagaggtcctggcagcagttgaagaaagatagatgatgaaggctttaaccaggacagtagcagttgaaatctgataagttgtgatagttaagatttatgttaaaaattgagccaaaagtattggatatcagatggaaagaaagaaaaaaaataaggatgatggctgactttgggacaggatcacctaagtgaatatcttactacagtgggggaaatctagaggatttcccatatggccattctaaaccatttgtaattctagtctcagggaatcctgtgccctcttctgaccacagtgagcaccaggcaaaacacttatacacataaaatactaagatagaaatgtaaaaaacaagtgggtaagagtggtagtgtgtgtgtgtgtgtgtgtgtgtgtgtgtgtgtatgttggggtgtgagaatacaggtatttgcatatacagagaataggatctgaacttgggtcctctgcaagagcaacaagccatctctccagccacaccttcaggctgagttttattccacgaatgcaaggatggtttaaaattagaaatcaattataattttaagaacagatcatgtgagtatcccaatacatgcaggaaaaagcatttaataaaattcaatacctacatatgattttaaaaacaccttaaagaactataattagaatgtccttaatctgatcaaaatgtctataaagctgtagaggaaacatgatatttaattgagaacaaagcaagaaacagcaagatctacagtgcaatatcattcacaaaaataaagtacatcattttcctaccttgtgaaattttgggaagaaaatcttaagttccttaaattagataaaagagatttaaatgacatattttatacttgcactaaaaaaaaaaaatagaaaaaaaggcatattgtaccaaaagtattttagcagtagaattaaaaggagccatttaaaaaatgagagtgtagcatttaaaaataatattcctttaaaatggggagatagagtctgaggataaaacgtaatggtagagcacttgcctaccactcataaagccctggattcaatccccaacataaaaagtggggcaattacaaccaggaaagtatactacatgtatatatctcaacaaactgaagaattttagcaatatggaaaatagaacacacacatccactctatccaaaaatctgtgggagtggtgggacatttttttttaattccaaaatgacaaagaaaaatgagaaagatgacacagttcaaaatactgaaggcacatcccatatgatgctacacaagtataaacacaatttgacttgaggatacttatgtaatatctcccaaaaccattcatccatcatacacaccaatcaagtgtcccagaagctgtaagtgttgctcaatggtaaagtgtttgcctagcatgtacaaagccctgggataacccgtagcattacatacacctgtcatggtggtgcacaattataaggccagtacacaggaagtaaaaggcaagaacatcagaaattcaaagtcatccttggctacattatgaattcaaagccagcctaggctacatgagatgctgtctcataaacaaaacaaaacccaatctctttcatacaggaaaacatttatattcataaaataaaaataaatacacatttaaaggtaaaatagaaaaagacaataaattatgcttgcatgtacatgctctcaaagctttccttttttactcttaaaactactcaaaaaaagtaccatggctggcacgatggacagtgtaaaggctcctgctgctaagcctgatgacctaagtccaagtcccagtacctaaaactgactcccataaattgtcctgtgacctttattcacatacttgctatggctcattctttccttctccccaatccaaatggatggacaggcagacagacagacaaaattttgcaatgaaagaaaagtgcctaagattaaaaggaaataaagaaactttggtgaaagttctgttggcaaaatgcttgatggtgcaagcatgagaacctgatttcaagccgggcggtggtggcgcacaactttaatcccagcacttaggaggcagaggcaggtgggtttctgagtttgaggccagcctggtctacagagtgagttccaggatagccagggctacacagagaaaccctgtctcaaaaaacaaaacaaacaaataaacaaacaaaaagagagaatctgatttcaatcttcaaaacttttttttttttttaaatctgaacatggagccatgtgtttggaattttgtaattccagtactggggagtcagaaacaagcagaatcctgaggctagctgactagcctaacccagcctacttggtgagtttcatgcaagtgataggcccaatctctttaaatcacctttaaatatgatggatgtggagggcatgaagtctctgtgctcatagacaaggaatatagaaaccagggatgtgaagcatgcaggcaggcttgtctcttcaacagaagggatgtatatgcctcttttccacccagaaggctgggagtggattttgttaatagcctggtggtctgcgccacctgtgtggtcaggtcacacccaaatcccccctcccccagtttatatcagactctccctccctagaccttcatccgcagttttgttctcagtcagtagactgagatgtcaacaagtattttatagcctggtgacctcaacactatctgcatgacagaaaccacaccagatcctagggccctaagctgtagaatgcatcctcacggtagaggtcacctaaactttgcaaaagactttccatgtagttaggcccaaatattcattttctacacagaattgagaaaactgtaaccagggaacttttctttcccaaaattgcaccatacttaaataagtttaaaataaaccgcacagggtcagactagaattttgaaccaacactggctaagacagatttcctttctgccccttgcagttcatttccctgcagtagagcttacagagacccccatgatggttcctgaggtccaacactagtggttgtctcctgtctccacatgtacatgtagacatgcatcaatatccacatatatacctgcatacacacacacaccccacaagagagagagagagagagagagagagagagagagagagagagagagaatgagaatgtagagaagaattatttgaaaaatacggtagctggaaaaatatagctgaaaatatttgaccaggcagctgcagaagagatagggggcagtttgcaggttaaacaacaaagagtctgaatctggaggcacgttatatacaaaaaatgaaataaaacaatagtagacacacagggattcagtgcaggatgatggtttcagttggaacacccctctccccaagcagacagctgagctggagccaacaagggcttaaagagaaaacatctggctgttctataaagaagctgaacatctgtagagagccaaggcttccagcatggatgctgacaattcctgagtaatttcttcctcattttagccagtagactctatgatctccactcttccagcccctgccctcacagaggtcgtttggatcaggaaagcagatctccaacagaacattaaatccacaatagctattgaactcttctttattaattataaataattactaagtaccataaaaaattgagagaaagagctcggtgtggtgtcttatacctgtaatcctagcactgaggaggccatgaggcagaagaatcaccacaagtttcaggtcagccagaggtatattgttagaacctgtcttcttaaacatgaaaaagaaatagacgggagccttccatacacacaaaaattcaaggtcttgtctaaaatgtacaaaacactggctttaatgcccaacactgaaaaaaaaaacacatattgcatctataaataagaacagaacattatataatagagcattcagagacaaaaagtaattcttaaaaagaggagaaaaatgagaactttgaggagtattctggaattcgagagcttaacaagaatttgaaaattaaaaactgagcaaaacctacaaagtctcagattctacgggagtgagaggctcccaggatccaatggagatgactttagccgaaatatccaacaaaggggggatacaacctgtagagaccacctccagtagataagcatggcccccagttgggagatggggccacccctgcatctcaaaacttttaactcagaaatgatcctgtccaaagaaatgacagggacaaaaaaaaaaaaaagcaacagagactgaaggaaaggacatccagagaccaccccacctagagatccatcctatctgcagacaccaaacgtccacactactgctgatgccaagaagtgcttgctgacaggagcttagcatggctgtcctctgagaggctctagcagcacctgaccaatacatattgagatagagccaatcattgggttgagtctggggaccccaatggaagagctagaggaaggactgaaggacctgaaagggattgcaactccatacaaagaacaatatcaactaactggaccacccagagctcccagggactaaattaccaaccaaagtgtatacacatggagggatccatggctccagctgctatgtagccttatctgatatcagtgggaggggaaggaggcttgatgccccagggtagggggatactaaaggggtgaggcaggaatgggtgagtgggtagaggagcaccctcatagaggcaaaaggtgtggagagggggtatgggataggggattgtggaggagtaacctggaagggggatatcatctgaaatgtaaacaaataaaatgattaataaaaaacaagtgaaaaaaataaaagctgaggaaaagaaacagttatgagactagcaccagacaaaagttaacagggcaactagaacatagacaatagggcaaagcttttaaaattgtaggagaggcaatcaagtgttagggatccctttctgatccaggaggttatttatttctcaataaaaccttgcttgttaccccccaaaaattctaaaggaaaatgcttgtccataagcaatagaatcatgtacaagtcaaaatatttatcatgtataacaatgaaataaggagttatagagatatatgaactaataaatttctctcaaatacattttcttaagaagttacttgaggatgttttgaagcaaaacaaagatataagccaaaaaagaagtggtgggatccacaaggtgggggttcacagggatgccaactgggcagaaaaatgacaaactcagtgtgtgtgtgtgtgtgtgtgtgtgtgtgtgtatgagagagagagagagatccaagaattaaaaacaaattagctatatgtttgtgaattcaatgttttagaaggtgtgattaagagtttgaagaagctggatatgggtttaggatgtggtttggttaggagactgcttgcctaacatacaagaaaccttgggattgatccccagtgccacataaactgggggtgatagtatatgcctgtacagtacagtacagcactaagggtgtggagttaggaggattagaagttcaaggtcattctcagtcttagaacacaccaagatcaatatcattagcaaagcaaaatttatcataattttctaatttatggcacataagaaaaaatagcataatgggacagtgctatcttcttaagttgtccaggagtcatcaaactagactcgtgaaaatgcagcacaactctaacatgtctcctcgtccttttcctttctttcctcatccttcttttagttgagatgaggtctcttcagtctatacccagagtggtctcaaactgacagcaatgcttttatcctcagcttcccaagtgttgagactacaggtgtcagccaccattcccagccttatgtggttatcttagttgtggtaaatttaaacaacacactttaatttctcatgccactaactttcaatatcaatattacatttgacagttttgtatcagctagacttcaattttacattgttggggttcatatgtaaaatatgaaaagataatcaccaaaaaaaaaaaaagaaaagaacagaagaaagtagaacaaaaggatattagagtttgagagaccctgataaatgatacccatttttcccactgagttgtagtggaacttaataagcaaacacacacaaagttcagctaaaaatcccttatttaaaggttcttcagtaaacacaagttcaatcaagaagtgaaaccttcctttaactagataatttaaaatgctatggaaatacagagatgaaacaaatccaggtttgctgtcaaaacagacagccaacagaaacacatggattcttaaagggagccaagtacagtgttgagcagctccagcagcttgttggccagccctgcttctattccctcacccactcattttcttaattcacagaaatgtggcccaggacctagttctagccaatgaaaggtgagggtgagtagactgggggatttggggaagctgcagctgttctgctccccttgatcagggtgagcctggagaaggcagaggatgtctggccataagtcagttagctaccaaacacgtttttgaggtcttgtgagattagatatttcatcaatatctgctattttccagctttggtttaaatatttttttctctggttattgtttgttttcttgcttgcttaggttgactgctactttctctttatgttttctttttatgtactcaaagaaccaagtttggtattaattttcttgcctctctctgtttattgacttggtacttcctctgctctcacagttccagtgttctacatattttcaaactttgattgttttcaactgaaatttaaatctaattctagtagatcccctttttgttcattgtttcttttctaattttgaaacttcttgagggtcatttttgggccttaatattagtctctggctcttctatgaacccccttgccactatgctaagcaagatctactatctagtgtgggccaccctgcaggatatgagagaggtgaaggatgagttttagagtctttatttgcctaccatgcacaaagccctggatttggtccctagcaccacacaaacagggagttgtggttccagctctccagtggtgaaagcatgaagattagaaactcaaggtcatccttagctttgtttttattttgtttttagatttgtttttagagtagctgaatgttgataaaattgagaagaggttaatgaaaattcccatgtaccttctgccccaacaagatgcacagttccttcattatcaacacccattagagtgagacttttatatattcaatgaatctacactgacacgtcattatcattcagaatctgttacagagcactgttttaatgtgtgtgtgtgtgtgtgtgtgtgtgtgtgtgtgtgtgtgtgtgtgtgctggttagtcttatgtcaacatgacaagctagaatcatcaaagaggaaggagcttcaattatgaaaataccttcataagatccagctgtggacaactgtgtactctctcagtgagtggtgagagaatggagggcccagcccattgtgggtggtgccatctctgcactagtgatcttgggttctacaagaaagcaagttgagtccatgctttcagacaagatcagacacatttgccttgatacacctctctctgtggaaatgaagctcatgagcaagcatctgcatagtagaacttggcctgagaactgtcccctgagcaccactgtttagatctagtcttgctccttggtctggagaagtcacacaggaccccaagagcatcctgccttcctgtggaaacctttgggggccccaaaactaaccagcttggaaccctgcctgaacacccatcctagttggagctgcctgacaccctagctgggtctgactggggcacaccctgtagagtagtaaccactcaagaaaaagcctgcagagtggtgtctgcctgagacacagccaacagagtagggtatcctgacctacattttctagcctatggcttcccccacctcctcatgaagtcctgctgctatcaggatcatcctgccagtaccagggaaaaccagatgcctaaaggacagtgtaagaacacaatcaacaagactcaaggcaatatggcatcaccagagctcagctatcctctacagcaaaccctagatatcctaatgaaactggagcacaacaagaggatctcaaatccaactttataaagatgatgcaggcctttaaagaggacataaatacattctttaaagaaacacaggataatacattcaaacagatagaggcattaaaagaggaagcaaggagctagagagatgactcagcagttaagagcactgactgctcttccagaggtcctgagtccagttcccagcgaccacatgataatgggatccaatgccctcttctggtgtgcctgaagacagccacagtgtattcatataaataaaataaataaatctttttttttttttaaagagaaagccgggctggaaagatggctcagtggctaagagcactgattggtgagactaggccggggcctagcaaacacataagtggatgctcaaagtcagctattggatggatcacagggcccccaccaatggaggagctagagaaagtaaccaaggagctaaagagatctgcaaccctgtaggtgcaacaacattatgaacgaaccagtaccccggagctcttgactctagctgcatatgtatcaaaagatgggggctggtgagatggttcagttggtaagagcacctgactgctcttccgaaggtccggagttcaaatcccagcaaccacatggtggctcacaaccatctgtaacaagatctgactccctcttctggagtgtctgaagacagctacagtgtacttacatataataaataaataaatcttttaaaaaaaaaagatggcctagtaagccatcactggaaagagaggcccattggacacacaaactttatatgccccagtacaggggaacgccagggccaaaaagtgggaatgggtgggtaggggagtgggggggggagggtatgggggacttttgggatagcattggaaatgtaattgaggaaaatacgtaataaaaaatataataataaaaaaaagagcactgactgctcttctagaggtcctgacttcaattcccatcaaccacatggtggctcacaaccatctgtaatgggatctgatgccctcttctggtgtgtctgaagagagcaacggtgtactcacatacataaaataaataaatctttaaaaaatgaggaagcaaataaatataaagaaatatgagaaaatacaatcaaacaggtgaaggacatgaataaaactgtccaaatcctgaatataaaatagaagcaataaagaaaacacaaactgaggcaatcctgaagatggaaaacctaggaaagagaacaggaactacagatgtaagcatcaccaacagaatacaggaaatggaagagagaatctcatcaatatatcactcaaagaaaatgcaaagtctaaaaggttcatgacacatccaggaaagataagacaacactgatcactctccccatatctcttcaatacagtacttaaagttatagctggagcaatgagacaacaaaaggagatcaaggggatacaaactagaaaggaagaagtcaaagtattgctatttgcagatgatatgatagtatatatatatatgtgaccccaaaaattgtaccagaggacttttcatcaaattggctggatacaaaattaactcaaaggaattaatagccctcctctacacaagcgataaatgggctgagaaagaagttagggaaacagtactcttcacaatagccacaagtaacataaaataccttggtataactccaagcaagtgaaatatttgtatgacaaggacttcaagtctctgaagaaagaaattgaagaaaatatcagaagatggaaagatctccctggctcatgtatcagtaagattaatatagtgaaaatggccatcttactaaaagcaatctacagatccaatgcaattcccatcaaaattccaacgtaattctttacagaacttgaaagagcaattctcaactttatatggaaaaacaaaaacccagggtagctaaaatgatctcgtacaataaaagaatttctggaggtatccccaccccctgacttcaagctgtattacagagaaatagtaataaaaactgcatggtattggtatagaaacacacatgatgataaatggaatcacatcaaagatccagaaataagcccatgcatctatgggtggttgatttttgacaaagaagccaaaaccttataatagaaagaagagagcatcttcaacaaatggtgcttgtctatctggaggtctgcctgtagaagaatgaaaatagatccaatatttgttaccctgcacaaaactcaagtccaaatgaattaaaggcatcaatgtaaaaccagacacaatctaatagaacagaaagtggggaatatccttaaacttgtcggta

SEQ ID NO: 1035 - DNA, 47 bp, Homo sapiens
ctgcatcatcgtcgtcagagccaccgcagattatcatcaaccctgcc

SEQ ID NO: 1036 - DNA, 45 bp, Homo sapiens
gctaagggagtgccatctccaccccaggactggcccttggcagct

SEQ ID NO: 1037 - DNA, 41 bp, Homo sapiens
tccatggcagcccctggcagcgccatcaggagccagtgccc

SEQ ID NO: 1038 - DNA, 44 bp, Homo sapiens
cctgggccagctggcctgctgctgcctgcaccgccgggccaaaa

SEQ ID NO: 1039 - DNA, 45 bp, Homo sapiens
aggtctggctgcagatgcctgggctgctcccatcgccatgcagat

SEQ ID NO: 1040 - DNA, 45 bp, Homo sapiens
ggctggtcagagggctgtgaagacgcacggtgccaggaccaagta

SEQ ID NO: 1041 - DNA, 30 bp, Homo sapiens
ggccagagggggagccacaccaggtcccgt

SEQ ID NO: 1042 - DNA, 46 bp, Homo sapiens
gcgtgtaccgggcggtgatgaggaacacggtgtatgctgtgaagag

SEQ ID NO: 1043 - DNA, 48 bp, Homo sapiens
ttgcactctcttggctgtcacccgatcgccagcaaaacttagatgtga

SEQ ID NO: 1044 - DNA, 41 bp, Homo sapiens
ggtgttgaggcttatatttgtgtaatttttggtgggtgaaa

SEQ ID NO: 1045 - DNA, 47 bp, Homo sapiens
tcgtggtcttttcctcgcttctttcaagggctttcctgtgccaggtg

SEQ ID NO: 1046 - DNA, 47 bp, Homo sapiens
aattatacctgttgcttaattacaatatttctgataaccatagcata

SEQ ID NO: 1047 - DNA, 50 bp, Homo sapiens
tttagttttgcttttagtttttctgtcccttttatttaacgcaccgacta

SEQ ID NO: 1048 - DNA, 48 bp, Homo sapiens
atctttgggcatatacatttttagcctgtgtcattgccccaaatggat

SEQ ID NO: 1049 - DNA, 50 bp, Homo sapiens
ctgacaatactgtatgtcgtcgagctccccccaggtctacccctcccggc

SEQ ID NO: 1050 - DNA, 43 bp, Homo sapiens
tccttagggttttctctctatttccccctttcttcctcattcc

SEQ ID NO: 1051 - DNA, 47 bp, Homo sapiens
ggctcctgcccccatagtggcctcgaactcctggcactaccaaagga

SEQ ID NO: 1052 - DNA, 46 bp, Homo sapiens
atgtgtccatttccttatgctgtaaaagcaagtcctgcaaccaaac

SEQ ID NO: 1053 - DNA, 42 bp, Homo sapiens
aaaaccgtgtttgtctcttctggaatggttagaagtgaggga

SEQ ID NO: 1054 - DNA, 46 bp, Homo sapiens
ttgtgtatttcagttattgtccctggcttccttactatggtgtaat

SEQ ID NO: 1055 - DNA, 49 bp, Homo sapiens
gtttacagagatgtctcttatatctaaatctgtccaactgagaagtacc

SEQ ID NO: 1056 - DNA, 86 bp, Homo sapiens
tgctgtgggtttttaattgatcagttttcatgtgggatcccatctttttaacctctgttcaggaagtccttatctagctgcatatc

SEQ ID NO: 1057 - DNA, 47 bp, Homo sapiens
gccagaacaccacacatttcactgtctgtctggtccatagctgtggt

SEQ ID NO: 1058 - DNA, 47 bp, Homo sapiens
ccagaactctgcctgccctttgtcctcctgctgccagtaccagcccc

SEQ ID NO: 1059 - DNA, 45 bp, Homo sapiens
caaggacaaacccctcaagtttaaaaaggtgaagaaagataagaa

SEQ ID NO: 1060 - DNA, 105 bp, Homo sapiens
cagacgaacttgttttagaatttaccatcgtaactgagctcccttcagcgcatacctccttggctcctgctcagtctctgtttctccttttagccaaactctcta

SEQ ID NO: 1061 - DNA, 46 bp, Homo sapiens
aagtcctgttaggccaaccacttctcagcatctgcactgccagtat

SEQ ID NO: 1062 - DNA, 41 bp, Homo sapiens
atgttcatgactctgaatgatgatatgtctgcctgctgatg

SEQ ID NO: 1063 - DNA, 48 bp, Homo sapiens
ttcctgtcagccctcttactatggaactcaaataggacagattcagct

SEQ ID NO: 1064 - DNA, 24 bp, Homo sapiens
tttttacataagactttgatggta

SEQ ID NO: 1065 - DNA, 43 bp, Homo sapiens
tcttcatggacccttctttcccttcacttctgtcccaggagac

SEQ ID NO: 1066 - DNA, 40 bp, Homo sapiens
gtgaagacgaggcatgaacaaccagccaggacatgtggag

SEQ ID NO: 1067 - DNA, 25 bp, Homo sapiens
gcaatactgtttgtagagatcacag

SEQ ID NO: 1068 - DNA, 46 bp, Homo sapiens
aaatgtgagttttcacttatgcggccattgtgattccgactgagac

SEQ ID NO: 1069 - DNA, 53 bp, Homo sapiens
tttgacatgtggatttcagaacttctgtgtggtaaagcagaatgttccaattg

SEQ ID NO: 1070 - DNA, 59 bp, Homo sapiens
gtgcttgctacactcctcccatggtaactaaagagagtacccagatatacatctggttc

SEQ ID NO: 1071 - DNA, 43 bp, Homo sapiens
tgcattttcagatatgggaactggtatgtggttggttccctag

SEQ ID NO: 1072 - DNA, 78 bp, Homo sapiens
tagaagtactacagttgattaaagtaagtcaccacaggtcacccattcgtggcaggtcagctaggtggctgatcactg

SEQ ID NO: 1073 - DNA, 44 bp, Homo sapiens
taggtaattattactctagagaattttgggttccatggctggaa

SEQ ID NO: 1074 - DNA, 63 bp, Homo sapiens
gcctccccctccttctcgcccattccatgaatttctgccccccgctacccccccgcgagcgag

SEQ ID NO: 1075 - DNA, 4047 bp, Homo sapiens
ctgtaatcccagctgctcgggaggccgaggtgggaggatcacgagcctgggaggttgaggctgcactgagccatgattgcaccactgcactccagcctgggtgacagaatgagtccctgtctcagaaaaaaagtaagttgtagaaagaccaagagctgtggcacagtgtctcacacctgtaacaccagcactttgggaggctgaggcgggaggatcacttgagcctacttggagaccagccaggccaacaaagcgagaccccatctcttttttttttttttttttttttatcaaaacccatacgattgagtgacaaggacctgaggactgcagctgcaggtgtggccacctggtagccatactgacagtatttatcccacagaaagacctggtggaagaggaggctgaggaggctggagtggctttgagaagcacccagagcacactgcaagcaggtctggctgcagatgcctgggctgctcccatcgccatgcagatctacaagaagcacctggaccccaggcccgggccctgcccacctgagctgggcctgggcctgggccagctggcctgctgctgcctgcaccgccgggccaaaaggaggcctcctatgacccaggtagccagctgcgcactgggacggggtggccagatagaaagcccgcattccaggccttgctctgtagtgaccccatctcagcacctgctaggtctctctggagtctccacacatttcttgcttgccctttggttctgtttggggcagcgcccctctgaactgaggggccccgggcagtcctgctttgcggagcccagctccgacccccttcacatagagagaaggaaagagctgctgccgcgccccctgctgggcgcactgcactactgcatctgcctttttctgtcccctccctagtaccccacctcttctcctctggtgacagttgaaaatggagaggccccgtttgagggcagcggggcagtgagattcattttgtagaaaagaacgaggccattctcagtccttgcttttggcagccgcgcttctcagcactccctgtgatgggaacagaggggcgaggggcagagcgttcccagctgcagggtatgtcattttagagccctggggcaggtcacggacggcctggagcagccctgtggtttgcccacggggtgaccggccagggctgccatctcaccctgagagtccctcttttccacttgcaggtgtacgagaggctagagaagctgcaggcagtggtggcgggggtgcccgggcattcggaggccgccagctgcatccccccttccccgcaggagaactcctacgtgtccagcactggcagagcccacagtggggctgctccatggcagcccctggcagcgccatcaggagccagtgcccaggcagcagagcagctgcagagaggccccaaccagcccgtggagagtgacgagagcctaggcggcctctctgctgccctgcgctcctggcacttgactccaagctgccctctggacccagcacccctcagggaggccggctgtcctcagggggacacggcaggagaatcgagctgggggagtggcccaggatcccggcccacagccgtggaaggtagctggggagacgggttcccaggagagggaccaaggcctctttgggccaaagcccctgtaagtccccaccccagccttctagaagagaaccagggccaaatgttcagctcactgtgaccttagcaaccctggtttcccctccccaggccacatccttcccaggtggagcttgctctccagccctccccccaccccattcctgaaggctgggaacaaggagggctctgtctggtagcctgagagctgggccctgcccttggacttctctgaggaattcaggcctgaggccagggaggcagggtgctaggctgcgggctggggagccacagcatgaggctaagggagtgccatctccaccccaggactggcccttggcagctctgcatcatcgtcgtcagagccaccgcagattatcatcaaccctgcccgacagaagatggtccagaagctggccctgtacgaggatggggccctggacagcctgcagctgctgtcgtccagctccctcccaggtgctgccgcccaggctggcctctggggtgctcaggcgcatccgtgtcagccccaaagagcagagtgtctgtcccgactgcgctgagggcgtggggcagccgggcaggccactggctctggcgacctctagaagcccagccggccccacatgcctcccttagcaagaccctggcccactccttccctcgcctcctgacagtagcacctcctttagcccgagggtgcctgccccactctgtgctttcaggaaataggaagccccagcaggaattttccatcccaggtactatttgaagaaccactgcttaggaaccctcagctgggcgaggtggctcatgcctataataccagcacttttggaggccaagatgggaggatcacttgagcccaggaggtggaggctacagtgagctgtgatcaagccactgcactccagcctgggagacagttagaccctgtctcaaaaacaaatgaacaaacaaacaaaaaccctcaattcccacgaacgccccaggagataagggagcatggcccaggccttgagccagggcttctggcagtaggggagcctcccccatttgctaagcggactttcctcttccttctgtaggcttgggcctggaacaggacaggcaggggcccgaagaaagtgatgaatttcagagctgatgtgttcacctgggcagatcccccaaatccggaagtcaaagttctcatggtcagaagttctcatggtgcacgagtcctcagcactctgccggcagtgggggtgggggcccatgcccgcgggggagagaaggaggtggccctgctgttctaggctctgtgggcataggcaggcagagtggaaccctgcctccatgccagcatctgggggcaaggaaggctggcatcatccagtgaggaggctggcgcatgttgggaggctgctggctgcacagacccgtgaggggaggagaggggctgctgtgcaggggtgtggagtagggagctggctcccctgagagccatgcagggcgtctgcagcccaggcctctggcagcagctctttgcccatctctttggacagtggccaccctgcacaatggggccgacgaggcctagggccctcctacctgcttacaatttggaaaagtgtggccgggtgcggtggctcacgcctgtaatcccagcactttgggaggccaaggcaggaggatcgctggagcccagtaggtcaagaccagccagggcaacatgatgagaccctgtctctgccaaaaaattttttaaactattagcctggcgtggtagcgcacgcctgtggtcccagctgctggggaggctgaagtaggaggatcatttatgcttgggaggtcgaggctgcagtgagtcatgattgtatgactgcactccagcctgggtgacagagcaagaccctgtttcaaaaagaaaaaccctgggaaaagtgaagtatggctgtaagtctcatggttcagtcctagcaagaagcgagaattctgagatcctccagaaagtcgagcagcacccacctccaacctcgggccagtgtcttcaggctttactggggacctgcgagctggcctaatgtggtggcctgcaagccaggccatccctgggcgccacagacgagctccgagccaggtcaggcttcggaggccacaagctcagcctcaggcccaggcactgattgtggcagaggggccactacccaaggtctagctaggcccaagacctagttacccagacagtgagaagcccctggaaggcagaaaagttgggagcatggcagacagggaagggaaacattttcagggaaaagacatgtatcacatgtcttcagaagcaagtcaggtttcatgtaaccgagtgtcctcttgcgtgtccaaaagtagcccagggctgtagcacagg

SEQ ID NO: 1076 - DNA, 4045 bp, Homo sapiens
agaccagcctgggcaacatagcaagataggcatggtggtacacacctgtaatcccagctgctcgggaggccgaggtgggaggatcacgagcctgggaggttgaggctgcactgagccatgattgcaccactgcactccagcctgggtgacagaatgagtccctgtctcagaaaaaaagtaagttgtagaaagaccaagagctgtggcacagtgtctcacacctgtaacaccagcactttgggaggctgaggcgggaggatcacttgagcctacttggagaccagccaggccaacaaagcgagaccccatctcttttttttttttttttttttttatcaaaacccatacgattgagtgacaaggacctgaggactgcagctgcaggtgtggccacctggtagccatactgacagtatttatcccacagaaagacctggtggaagaggaggctgaggaggctggagtggctttgagaagcacccagagcacactgcaagcaggtctggctgcagatgcctgggctgctcccatcgccatgcagatctacaagaagcacctggaccccaggcccgggccctgcccacctgagctgggcctgggcctgggccagctggcctgctgctgcctgcaccgccgggccaaaaggaggcctcctatgacccaggtagccagctgcgcactgggacggggtggccagatagaaagcccgcattccaggccttgctctgtagtgaccccatctcagcacctgctaggtctctctggagtctccacacatttcttgcttgccctttggttctgtttggggcagcgcccctctgaactgaggggccccgggcagtcctgctttgcggagcccagctccgacccccttcacatagagagaaggaaagagctgctgccgcgccccctgctgggcgcactgcactactgcatctgcctttttctgtcccctccctagtaccccacctcttctcctctggtgacagttgaaaatggagaggccccgtttgagggcagcggggcagtgagattcattttgtagaaaagaacgaggccattctcagtccttgcttttggcagccgcgcttctcagcactccctgtgatgggaacagaggggcgaggggcagagcgttcccagctgcagggtatgtcattttagagccctggggcaggtcacggacggcctggagcagccctgtggtttgcccacggggtgaccggccagggctgccatctcaccctgagagtccctcttttccacttgcaggtgtacgagaggctagagaagctgcaggcagtggtggcgggggtgcccgggcattcggaggccgccagctgcatccccccttccccgcaggagaactcctacgtgtccagcactggcagagcccacagtggggctgctccatggcagcccctggcagcgccatcaggagccagtgcccaggcagcagagcagctgcagagaggccccaaccagcccgtggagagtgacgagagcctaggcggcctctctgctgccctgcgctcctggcacttgactccaagctgccctctggacccagcacccctcagggaggccggctgtcctcagggggacacggcaggagaatcgagctgggggagtggcccaggatcccggcccacagccgtggaaggtagctggggagacgggttcccaggagagggaccaaggcctctttgggccaaagcccctgtaagtccccaccccagccttctagaagagaaccagggccaaatgttcagctcactgtgaccttagcaaccctggtttcccctccccaggccacatccttcccaggtggagcttgctctccagccctccccccaccccattcctgaaggctgggaacaaggagggctctgtctggtagcctgagagctgggccctgcccttggacttctctgaggaattcaggcctgaggccagggaggcagggtgctaggctgcgggctggggagccacagcatgaggctaagggagtgccatctccaccccaggactggcccttggcagctctgcatcatcgtcgtcagagccaccgcagattatcatcaaccctgcccgacagaagatggtccagaagctggccctgtacgaggatggggccctggacagcctgcagctgctgtcgtccagctccctcccaggtgctgccgcccaggctggcctctggggtgctcaggcgcatccgtgtcagccccaaagagcagagtgtctgtcccgactgcgctgagggcgtggggcagccgggcaggccactggctctggcgacctctagaagcccagccggccccacatgcctcccttagcaagaccctggcccactccttccctcgcctcctgacagtagcacctcctttagcccgagggtgcctgccccactctgtgctttcaggaaataggaagccccagcaggaattttccatcccaggtactatttgaagaaccactgcttaggaaccctcagctgggcgaggtggctcatgcctataataccagcacttttggaggccaagatgggaggatcacttgagcccaggaggtggaggctacagtgagctgtgatcaagccactgcactccagcctgggagacagttagaccctgtctcaaaaacaaatgaacaaacaaacaaaaaccctcaattcccacgaacgccccaggagataagggagcatggcccaggccttgagccagggcttctggcagtaggggagcctcccccatttgctaagcggactttcctcttccttctgtaggcttgggcctggaacaggacaggcaggggcccgaagaaagtgatgaatttcagagctgatgtgttcacctgggcagatcccccaaatccggaagtcaaagttctcatggtcagaagttctcatggtgcacgagtcctcagcactctgccggcagtgggggtgggggcccatgcccgcgggggagagaaggaggtggccctgctgttctaggctctgtgggcataggcaggcagagtggaaccctgcctccatgccagcatctgggggcaaggaaggctggcatcatccagtgaggaggctggcgcatgttgggaggctgctggctgcacagacccgtgaggggaggagaggggctgctgtgcaggggtgtggagtagggagctggctcccctgagagccatgcagggcgtctgcagcccaggcctctggcagcagctctttgcccatctctttggacagtggccaccctgcacaatggggccgacgaggcctagggccctcctacctgcttacaatttggaaaagtgtggccgggtgcggtggctcacgcctgtaatcccagcactttgggaggccaaggcaggaggatcgctggagcccagtaggtcaagaccagccagggcaacatgatgagaccctgtctctgccaaaaaattttttaaactattagcctggcgtggtagcgcacgcctgtggtcccagctgctggggaggctgaagtaggaggatcatttatgcttgggaggtcgaggctgcagtgagtcatgattgtatgactgcactccagcctgggtgacagagcaagaccctgtttcaaaaagaaaaaccctgggaaaagtgaagtatggctgtaagtctcatggttcagtcctagcaagaagcgagaattctgagatcctccagaaagtcgagcagcacccacctccaacctcgggccagtgtcttcaggctttactggggacctgcgagctggcctaatgtggtggcctgcaagccaggccatccctgggcgccacagacgagctccgagccaggtcaggcttcggaggccacaagctcagcctcaggcccaggcactgattgtggcagaggggccactacccaaggtctagctaggcccaagacctagttacccagacagtgagaagcccctggaaggcagaaaagttgggagcatggcagacagggaagggaaacattttcagggaaaagacatgtatcacatgtcttcagaagcaagtcaggtttcatgtaacc

SEQ ID NO: 1077 - DNA, 4041 bp, Homo sapiens
ctccttgggggtccttggacttccccacttgctccccaccctgcagccaaagtgctcttttcaaaggcccctttgccttttctctgctcttggggtgaaggcccagtcccttatgtggttgaccccccaacgccccaggtccctgggactcggggcgctccctgctgcctgcttcacagccttagtatgtgccgttcgctctgcgagaaaagccaccgcccacccaggtggttcctcctggtctgtctgatttcagaactggagatggcctccggtcctgtttccaccctgggggcgcctctctgcggggcgcctctctctctggggtacctctttgtctgtggggcacctctctgtggggcgctttccttctcggctctgccctctcaggctacttcctgccttcagaccccagctccatggggctctcccccaccaggaagtcagctctgtcaaaccgggtcccagggttctgtttgttcctgtatccctagggcccagagcaccactggcccacagtaggtgtttaataaatctctagaagctactcgggaatctgaggcaggaggatcgcttgagcctgggagttggagaccagcctgggcaacatagcaagataggcatggtggtacacacctgtaatcccagctgctcgggaggccgaggtgggaggatcacgagcctgggaggttgaggctgcactgagccatgattgcaccactgcactccagcctgggtgacagaatgagtccctgtctcagaaaaaaagtaagttgtagaaagaccaagagctgtggcacagtgtctcacacctgtaacaccagcactttgggaggctgaggcgggaggatcacttgagcctacttggagaccagccaggccaacaaagcgagaccccatctcttttttttttttttttttttttatcaaaacccatacgattgagtgacaaggacctgaggactgcagctgcaggtgtggccacctggtagccatactgacagtatttatcccacagaaagacctggtggaagaggaggctgaggaggctggagtggctttgagaagcacccagagcacactgcaagcaggtctggctgcagatgcctgggctgctcccatcgccatgcagatctacaagaagcacctggaccccaggcccgggccctgcccacctgagctgggcctgggcctgggccagctggcctgctgctgcctgcaccgccgggccaaaaggaggcctcctatgacccaggtagccagctgcgcactgggacggggtggccagatagaaagcccgcattccaggccttgctctgtagtgaccccatctcagcacctgctaggtctctctggagtctccacacatttcttgcttgccctttggttctgtttggggcagcgcccctctgaactgaggggccccgggcagtcctgctttgcggagcccagctccgacccccttcacatagagagaaggaaagagctgctgccgcgccccctgctgggcgcactgcactactgcatctgcctttttctgtcccctccctagtaccccacctcttctcctctggtgacagttgaaaatggagaggccccgtttgagggcagcggggcagtgagattcattttgtagaaaagaacgaggccattctcagtccttgcttttggcagccgcgcttctcagcactccctgtgatgggaacagaggggcgaggggcagagcgttcccagctgcagggtatgtcattttagagccctggggcaggtcacggacggcctggagcagccctgtggtttgcccacggggtgaccggccagggctgccatctcaccctgagagtccctcttttccacttgcaggtgtacgagaggctagagaagctgcaggcagtggtggcgggggtgcccgggcattcggaggccgccagctgcatccccccttccccgcaggagaactcctacgtgtccagcactggcagagcccacagtggggctgctccatggcagcccctggcagcgccatcaggagccagtgcccaggcagcagagcagctgcagagaggccccaaccagcccgtggagagtgacgagagcctaggcggcctctctgctgccctgcgctcctggcacttgactccaagctgccctctggacccagcacccctcagggaggccggctgtcctcagggggacacggcaggagaatcgagctgggggagtggcccaggatcccggcccacagccgtggaaggtagctggggagacgggttcccaggagagggaccaaggcctctttgggccaaagcccctgtaagtccccaccccagccttctagaagagaaccagggccaaatgttcagctcactgtgaccttagcaaccctggtttcccctccccaggccacatccttcccaggtggagcttgctctccagccctccccccaccccattcctgaaggctgggaacaaggagggctctgtctggtagcctgagagctgggccctgcccttggacttctctgaggaattcaggcctgaggccagggaggcagggtgctaggctgcgggctggggagccacagcatgaggctaagggagtgccatctccaccccaggactggcccttggcagctctgcatcatcgtcgtcagagccaccgcagattatcatcaaccctgcccgacagaagatggtccagaagctggccctgtacgaggatggggccctggacagcctgcagctgctgtcgtccagctccctcccaggtgctgccgcccaggctggcctctggggtgctcaggcgcatccgtgtcagccccaaagagcagagtgtctgtcccgactgcgctgagggcgtggggcagccgggcaggccactggctctggcgacctctagaagcccagccggccccacatgcctcccttagcaagaccctggcccactccttccctcgcctcctgacagtagcacctcctttagcccgagggtgcctgccccactctgtgctttcaggaaataggaagccccagcaggaattttccatcccaggtactatttgaagaaccactgcttaggaaccctcagctgggcgaggtggctcatgcctataataccagcacttttggaggccaagatgggaggatcacttgagcccaggaggtggaggctacagtgagctgtgatcaagccactgcactccagcctgggagacagttagaccctgtctcaaaaacaaatgaacaaacaaacaaaaaccctcaattcccacgaacgccccaggagataagggagcatggcccaggccttgagccagggcttctggcagtaggggagcctcccccatttgctaagcggactttcctcttccttctgtaggcttgggcctggaacaggacaggcaggggcccgaagaaagtgatgaatttcagagctgatgtgttcacctgggcagatcccccaaatccggaagtcaaagttctcatggtcagaagttctcatggtgcacgagtcctcagcactctgccggcagtgggggtgggggcccatgcccgcgggggagagaaggaggtggccctgctgttctaggctctgtgggcataggcaggcagagtggaaccctgcctccatgccagcatctgggggcaaggaaggctggcatcatccagtgaggaggctggcgcatgttgggaggctgctggctgcacagacccgtgaggggaggagaggggctgctgtgcaggggtgtggagtagggagctggctcccctgagagccatgcagggcgtctgcagcccaggcctctggcagcagctctttgcccatctctttggacagtggccaccctgcacaatggggccgacgaggcctagggccctcctacctgcttacaatttggaaaagtgtggccgggtgcggtggctcacgcctgtaatcccagcactttgggaggccaaggcaggaggatcgctggagcccagtaggtcaagaccagccagggcaacatgatgagaccctgtctctgccaaaaaattttttaa

SEQ ID NO: 1078 - DNA, 4044 bp, Homo sapiens
ctctccaggtagtgctagagaccttggctggtcagagggctgtgaagacgcacggtgccaggaccaagtatctggtgagccccttgaggcagggccaggagggacacacagctgctggcagccagcaggcacagccccagtggcggggataactggggcgcagtgcccatggatgcctctgctgccacagtggcctcatttttgaaagtaggcagggctccaaacaacttcgtttaccttgccgaggacaaacctgtctgtcctgcagacactatgggccttgtacagaccccacctgggctgggggcagggggaagggcggtcccagggcactgagacccaagctgcagtggaactcagaggactctggccggagaaaggcggtggtagagaagaagcaggccccgaggaacctcctgggccccagcaggctgcagctgagctctccgcaccgtgcagggcagcctgagctgcctcacggtcttactccactcagtctgcctcaccgtggactgtggtggggccaggagactagagacctgggttttagccccagcctgacagtggccttccagcaaattcctgctcccctgtgggcctgttttcccatatgcaaaacagacttcacagaatgtgctcagccagtaattgcttcactgcttctcctcttgtttggggcggttcctgtgtgctgtggggtctccgtcaggattcagccccgctgagaacccaggagccgggcttgagccctccttcctttcccttccccgtccgtccatccatgcatcctgctgaagaagcgcaccaggctccttgggggtccttggacttccccacttgctccccaccctgcagccaaagtgctcttttcaaaggcccctttgccttttctctgctcttggggtgaaggcccagtcccttatgtggttgaccccccaacgccccaggtccctgggactcggggcgctccctgctgcctgcttcacagccttagtatgtgccgttcgctctgcgagaaaagccaccgcccacccaggtggttcctcctggtctgtctgatttcagaactggagatggcctccggtcctgtttccaccctgggggcgcctctctgcggggcgcctctctctctggggtacctctttgtctgtggggcacctctctgtggggcgctttccttctcggctctgccctctcaggctacttcctgccttcagaccccagctccatggggctctcccccaccaggaagtcagctctgtcaaaccgggtcccagggttctgtttgttcctgtatccctagggcccagagcaccactggcccacagtaggtgtttaataaatctctagaagctactcgggaatctgaggcaggaggatcgcttgagcctgggagttggagaccagcctgggcaacatagcaagataggcatggtggtacacacctgtaatcccagctgctcgggaggccgaggtgggaggatcacgagcctgggaggttgaggctgcactgagccatgattgcaccactgcactccagcctgggtgacagaatgagtccctgtctcagaaaaaaagtaagttgtagaaagaccaagagctgtggcacagtgtctcacacctgtaacaccagcactttgggaggctgaggcgggaggatcacttgagcctacttggagaccagccaggccaacaaagcgagaccccatctcttttttttttttttttttttttatcaaaacccatacgattgagtgacaaggacctgaggactgcagctgcaggtgtggccacctggtagccatactgacagtatttatcccacagaaagacctggtggaagaggaggctgaggaggctggagtggctttgagaagcacccagagcacactgcaagcaggtctggctgcagatgcctgggctgctcccatcgccatgcagatctacaagaagcacctggaccccaggcccgggccctgcccacctgagctgggcctgggcctgggccagctggcctgctgctgcctgcaccgccgggccaaaaggaggcctcctatgacccaggtagccagctgcgcactgggacggggtggccagatagaaagcccgcattccaggccttgctctgtagtgaccccatctcagcacctgctaggtctctctggagtctccacacatttcttgcttgccctttggttctgtttggggcagcgcccctctgaactgaggggccccgggcagtcctgctttgcggagcccagctccgacccccttcacatagagagaaggaaagagctgctgccgcgccccctgctgggcgcactgcactactgcatctgcctttttctgtcccctccctagtaccccacctcttctcctctggtgacagttgaaaatggagaggccccgtttgagggcagcggggcagtgagattcattttgtagaaaagaacgaggccattctcagtccttgcttttggcagccgcgcttctcagcactccctgtgatgggaacagaggggcgaggggcagagcgttcccagctgcagggtatgtcattttagagccctggggcaggtcacggacggcctggagcagccctgtggtttgcccacggggtgaccggccagggctgccatctcaccctgagagtccctcttttccacttgcaggtgtacgagaggctagagaagctgcaggcagtggtggcgggggtgcccgggcattcggaggccgccagctgcatccccccttccccgcaggagaactcctacgtgtccagcactggcagagcccacagtggggctgctccatggcagcccctggcagcgccatcaggagccagtgcccaggcagcagagcagctgcagagaggccccaaccagcccgtggagagtgacgagagcctaggcggcctctctgctgccctgcgctcctggcacttgactccaagctgccctctggacccagcacccctcagggaggccggctgtcctcagggggacacggcaggagaatcgagctgggggagtggcccaggatcccggcccacagccgtggaaggtagctggggagacgggttcccaggagagggaccaaggcctctttgggccaaagcccctgtaagtccccaccccagccttctagaagagaaccagggccaaatgttcagctcactgtgaccttagcaaccctggtttcccctccccaggccacatccttcccaggtggagcttgctctccagccctccccccaccccattcctgaaggctgggaacaaggagggctctgtctggtagcctgagagctgggccctgcccttggacttctctgaggaattcaggcctgaggccagggaggcagggtgctaggctgcgggctggggagccacagcatgaggctaagggagtgccatctccaccccaggactggcccttggcagctctgcatcatcgtcgtcagagccaccgcagattatcatcaaccctgcccgacagaagatggtccagaagctggccctgtacgaggatggggccctggacagcctgcagctgctgtcgtccagctccctcccaggtgctgccgcccaggctggcctctggggtgctcaggcgcatccgtgtcagccccaaagagcagagtgtctgtcccgactgcgctgagggcgtggggcagccgggcaggccactggctctggcgacctctagaagcccagccggccccacatgcctcccttagcaagaccctggcccactccttccctcgcctcctgacagtagcacctcctttagcccgagggtgcctgccccactctgtgctttcaggaaataggaagccccagcaggaattttccatcccaggtactatttgaagaaccactgcttaggaaccctcagctgggcgaggtggctcatgcctataataccagcacttttggaggccaagatgggaggatcacttgagcccaggaggtggaggctacagtgagctgtgatcaagccactgcactccagcctgggagacagttagaccctgtctcaaaa

SEQ ID NO: 1079 - DNA, 4045 bp, Homo sapiens
catctggctctgcctttgtccacacccttgtcaggcccaatccatgtccacaccagaggcctcttccctgccaaggccactgccatgctctccctcttccctctctccaggtagtgctagagaccttggctggtcagagggctgtgaagacgcacggtgccaggaccaagtatctggtgagccccttgaggcagggccaggagggacacacagctgctggcagccagcaggcacagccccagtggcggggataactggggcgcagtgcccatggatgcctctgctgccacagtggcctcatttttgaaagtaggcagggctccaaacaacttcgtttaccttgccgaggacaaacctgtctgtcctgcagacactatgggccttgtacagaccccacctgggctgggggcagggggaagggcggtcccagggcactgagacccaagctgcagtggaactcagaggactctggccggagaaaggcggtggtagagaagaagcaggccccgaggaacctcctgggccccagcaggctgcagctgagctctccgcaccgtgcagggcagcctgagctgcctcacggtcttactccactcagtctgcctcaccgtggactgtggtggggccaggagactagagacctgggttttagccccagcctgacagtggccttccagcaaattcctgctcccctgtgggcctgttttcccatatgcaaaacagacttcacagaatgtgctcagccagtaattgcttcactgcttctcctcttgtttggggcggttcctgtgtgctgtggggtctccgtcaggattcagccccgctgagaacccaggagccgggcttgagccctccttcctttcccttccccgtccgtccatccatgcatcctgctgaagaagcgcaccaggctccttgggggtccttggacttccccacttgctccccaccctgcagccaaagtgctcttttcaaaggcccctttgccttttctctgctcttggggtgaaggcccagtcccttatgtggttgaccccccaacgccccaggtccctgggactcggggcgctccctgctgcctgcttcacagccttagtatgtgccgttcgctctgcgagaaaagccaccgcccacccaggtggttcctcctggtctgtctgatttcagaactggagatggcctccggtcctgtttccaccctgggggcgcctctctgcggggcgcctctctctctggggtacctctttgtctgtggggcacctctctgtggggcgctttccttctcggctctgccctctcaggctacttcctgccttcagaccccagctccatggggctctcccccaccaggaagtcagctctgtcaaaccgggtcccagggttctgtttgttcctgtatccctagggcccagagcaccactggcccacagtaggtgtttaataaatctctagaagctactcgggaatctgaggcaggaggatcgcttgagcctgggagttggagaccagcctgggcaacatagcaagataggcatggtggtacacacctgtaatcccagctgctcgggaggccgaggtgggaggatcacgagcctgggaggttgaggctgcactgagccatgattgcaccactgcactccagcctgggtgacagaatgagtccctgtctcagaaaaaaagtaagttgtagaaagaccaagagctgtggcacagtgtctcacacctgtaacaccagcactttgggaggctgaggcgggaggatcacttgagcctacttggagaccagccaggccaacaaagcgagaccccatctcttttttttttttttttttttttatcaaaacccatacgattgagtgacaaggacctgaggactgcagctgcaggtgtggccacctggtagccatactgacagtatttatcccacagaaagacctggtggaagaggaggctgaggaggctggagtggctttgagaagcacccagagcacactgcaagcaggtctggctgcagatgcctgggctgctcccatcgccatgcagatctacaagaagcacctggaccccaggcccgggccctgcccacctgagctgggcctgggcctgggccagctggcctgctgctgcctgcaccgccgggccaaaaggaggcctcctatgacccaggtagccagctgcgcactgggacggggtggccagatagaaagcccgcattccaggccttgctctgtagtgaccccatctcagcacctgctaggtctctctggagtctccacacatttcttgcttgccctttggttctgtttggggcagcgcccctctgaactgaggggccccgggcagtcctgctttgcggagcccagctccgacccccttcacatagagagaaggaaagagctgctgccgcgccccctgctgggcgcactgcactactgcatctgcctttttctgtcccctccctagtaccccacctcttctcctctggtgacagttgaaaatggagaggccccgtttgagggcagcggggcagtgagattcattttgtagaaaagaacgaggccattctcagtccttgcttttggcagccgcgcttctcagcactccctgtgatgggaacagaggggcgaggggcagagcgttcccagctgcagggtatgtcattttagagccctggggcaggtcacggacggcctggagcagccctgtggtttgcccacggggtgaccggccagggctgccatctcaccctgagagtccctcttttccacttgcaggtgtacgagaggctagagaagctgcaggcagtggtggcgggggtgcccgggcattcggaggccgccagctgcatccccccttccccgcaggagaactcctacgtgtccagcactggcagagcccacagtggggctgctccatggcagcccctggcagcgccatcaggagccagtgcccaggcagcagagcagctgcagagaggccccaaccagcccgtggagagtgacgagagcctaggcggcctctctgctgccctgcgctcctggcacttgactccaagctgccctctggacccagcacccctcagggaggccggctgtcctcagggggacacggcaggagaatcgagctgggggagtggcccaggatcccggcccacagccgtggaaggtagctggggagacgggttcccaggagagggaccaaggcctctttgggccaaagcccctgtaagtccccaccccagccttctagaagagaaccagggccaaatgttcagctcactgtgaccttagcaaccctggtttcccctccccaggccacatccttcccaggtggagcttgctctccagccctccccccaccccattcctgaaggctgggaacaaggagggctctgtctggtagcctgagagctgggccctgcccttggacttctctgaggaattcaggcctgaggccagggaggcagggtgctaggctgcgggctggggagccacagcatgaggctaagggagtgccatctccaccccaggactggcccttggcagctctgcatcatcgtcgtcagagccaccgcagattatcatcaaccctgcccgacagaagatggtccagaagctggccctgtacgaggatggggccctggacagcctgcagctgctgtcgtccagctccctcccaggtgctgccgcccaggctggcctctggggtgctcaggcgcatccgtgtcagccccaaagagcagagtgtctgtcccgactgcgctgagggcgtggggcagccgggcaggccactggctctggcgacctctagaagcccagccggccccacatgcctcccttagcaagaccctggcccactccttccctcgcctcctgacagtagcacctcctttagcccgagggtgcctgccccactctgtgctttcaggaaataggaagccccagcaggaattttccatcccaggtactatttgaagaaccactgcttaggaaccctcagctgggcgaggtggctcatgcctataataccagcacttttggaggcc

SEQ ID NO: 1080 - DNA, 4045 bp, Homo sapiens
gctcagaacggcttctactgcctggtgtacggcttcctgcccaacggctccctggaggaccgtctccactgccaggtaggctcacctggcccggcacgcttcccaggacccaaagcactcctgacacctggctggagccgggcgcggggcctagggctttcagcctgtgtgagtgggtcctgccagcaggccaggcctgcacttccagctccccagcagcacccggctcaggatttggcccacggtggggtcaatttttttttttttttttttttttttttttttgaggtggagtcttgctctgtcatccaggctggagtgcagtggtgtgatctcagctcaccacaacctccacctcccgggttcaggcgatcctcctgccgcagcctcccgagtagctgggactacaggcatgcaccaccacacctgcctaatttttgtatttttagtagagatgaggttttgccacattggccaggctagtctcgaactcctgaccccaggtggtctgcgcgcctcagcctcccaaagtgctgggattacaggcgtgagccaccacgcctggcccgacccaatgttttctatagagctctttcccaggcctctcccctttgcaagcagcgtagctggagggtctcatcagcaagccccggaggcgagggggtctggggctaccagctggaccacctacagctgagggagggcccccttgcctcctcctgcatgctgcgtttggggagagcgggaagaatgccttcaaggacttcccgaccaccagggacaaagggatgagccctgggagccgaagcccagcagattctattgaacgtgtccccagccattgcttaagaagtgcaggtcacggagactttgctcctcgttttccagaagggggaaactgaggcctagagagtgaagtggctgttccaggctgcacggtgacaggtagaaggatggttgggatcaaggaacggccatccagcaacctcccctgtccccctttgccaccccagacccaggcctgcccacctctctcctggcctcagcgactggacatccttctgggtacagcccgggcaattcagtttctacatcaggacagccccagcctcatccatggagacatcaagaggtgaggaggggcccttgagaactgccggggcagggcctgcagcaaggggggccccgcgtcctatcaatgtggggatcaggcatggcctgggacctcaacaccccggcatcgcacaggtgtgggaacgggccaaggatgggccctactgatgagcagaggcccccaggcagctggagcgctcagggcagtgccagcgctttctgtgggcaaggcaccgggctggcagcctcgagtccagccttatctaagccgggcaggtgtaggagctaggaccgggctgacgccactgtcttctctccccaagttccaacgtccttctggatgagaggctgacacccaagctgggagactttggcctggcccggttcagccgctttgccgggtccagccccagccagagcagcatggtggcccggacacagacagtgcggggcaccctggcctacctgcccgaggagtacatcaagacgggaaggctggctgtggacacggacaccttcagctttggggtggtgagccactgacccctctgctggctcagaggaggagaagccacaggcaggcagaggtgggggctgcagagtgcactgcgggccaggggccatctgccaagaccccaggaggctgcagctccagggtccccctccctccgaggccctcctcctcaccctgcacctaactgtgtgtttgtaatttgtcttcaagtgggctctccgagttgcccgagcttcagtcccataacatctggctctgcctttgtccacacccttgtcaggcccaatccatgtccacaccagaggcctcttccctgccaaggccactgccatgctctccctcttccctctctccaggtagtgctagagaccttggctggtcagagggctgtgaagacgcacggtgccaggaccaagtatctggtgagccccttgaggcagggccaggagggacacacagctgctggcagccagcaggcacagccccagtggcggggataactggggcgcagtgcccatggatgcctctgctgccacagtggcctcatttttgaaagtaggcagggctccaaacaacttcgtttaccttgccgaggacaaacctgtctgtcctgcagacactatgggccttgtacagaccccacctgggctgggggcagggggaagggcggtcccagggcactgagacccaagctgcagtggaactcagaggactctggccggagaaaggcggtggtagagaagaagcaggccccgaggaacctcctgggccccagcaggctgcagctgagctctccgcaccgtgcagggcagcctgagctgcctcacggtcttactccactcagtctgcctcaccgtggactgtggtggggccaggagactagagacctgggttttagccccagcctgacagtggccttccagcaaattcctgctcccctgtgggcctgttttcccatatgcaaaacagacttcacagaatgtgctcagccagtaattgcttcactgcttctcctcttgtttggggcggttcctgtgtgctgtggggtctccgtcaggattcagccccgctgagaacccaggagccgggcttgagccctccttcctttcccttccccgtccgtccatccatgcatcctgctgaagaagcgcaccaggctccttgggggtccttggacttccccacttgctccccaccctgcagccaaagtgctcttttcaaaggcccctttgccttttctctgctcttggggtgaaggcccagtcccttatgtggttgaccccccaacgccccaggtccctgggactcggggcgctccctgctgcctgcttcacagccttagtatgtgccgttcgctctgcgagaaaagccaccgcccacccaggtggttcctcctggtctgtctgatttcagaactggagatggcctccggtcctgtttccaccctgggggcgcctctctgcggggcgcctctctctctggggtacctctttgtctgtggggcacctctctgtggggcgctttccttctcggctctgccctctcaggctacttcctgccttcagaccccagctccatggggctctcccccaccaggaagtcagctctgtcaaaccgggtcccagggttctgtttgttcctgtatccctagggcccagagcaccactggcccacagtaggtgtttaataaatctctagaagctactcgggaatctgaggcaggaggatcgcttgagcctgggagttggagaccagcctgggcaacatagcaagataggcatggtggtacacacctgtaatcccagctgctcgggaggccgaggtgggaggatcacgagcctgggaggttgaggctgcactgagccatgattgcaccactgcactccagcctgggtgacagaatgagtccctgtctcagaaaaaaagtaagttgtagaaagaccaagagctgtggcacagtgtctcacacctgtaacaccagcactttgggaggctgaggcgggaggatcacttgagcctacttggagaccagccaggccaacaaagcgagaccccatctcttttttttttttttttttttttatcaaaacccatacgattgagtgacaaggacctgaggactgcagctgcaggtgtggccacctggtagccatactgacagtatttatcccacagaaagacctggtggaagaggaggctgaggaggctggagtggctttgagaagcacccagagcacactgcaagcaggtctggctgcagatgcctgggctgctcccatcgccatgcagatctacaagaagcacctggaccccaggcccgggccctgcccacctgagctgggcctgggcctgggccagctggcctgctgctgcctgcaccgccgggccaaaaggaggcctcctatgacccaggtagcc

SEQ ID NO: 1081 - DNA, 4030 bp, Homo sapiens
ccgtgtgcagggggctagacgtggggcgggcaggcagggctcctggtaacagccctgcaggccgcagtggagagcagggttccggcagggccgcccaggagctttcggaaggcccggccccggcccctttccgagcagcccgggcctccgccctgccctctgtccccaacgccgggagccgccgttcgtcctccagagccccgcccgggcgagcccgggaggccgatcgccgctcgcggaacccgccgggacccgggccctccccggcgcggggcgcccccgtgtgacccagcgcgcggccgcggcgcgcaagatggcggcgggcccgggcaccgccccttccgccccgccgggcgtcgcacgaggccggctcgaaggggaagtgagtcagtgtccgcggacccggccggcccaggcccgcgcccgccgcggccctgagaggccccggcaggtcccggcccggcggcggcagccatggccggggggccgggcccgggggagcccgcagcccccggcgcccagcacttcttgtacgaggtgccgccctgggtcatgtgccgcttctacaaagtgatggacgccctggagcccgccgactggtgccagttcggtgggtggcggcgggctgccggggggcgggaggcgcgcgggctcctggcgccgacgcctgacgccccccgccccgcagccgccctgatcgtgcgcgaccagaccgagctgcggctgtgcgagcgctccgggcagcgcacggccagcgtcctgtggccctggatcaaccgcaacgcccgtgtggccgacctcgtgcacatcctcacgcacctgcagctgctccgtgcgcgggacatcatcacagcctgtgagcgcgggactccgggcaccccacggctgggaggccggcgggccccacggggctcccccacccgggcctcaaccttcctttccttccttggcgtcccagggcaccctcccgccccgcttccgtccccaggcaccactgccccgaggcccagcagcatccctgcacccgccgaggccgaggcctggagcccccggaagttgccatcctcagcctccaccttcctctccccaggtaagagggcccggttgttaggctcggtggacccaaagaagagcccaccttgaccacggccacggctgtagaccctgctgctggtctctgcctgcctctcactggtgtctttatgaagcttttccaggctcccagacccattcagggcctgagctcggcctggtcccaagccctgcttccctgtggcctccaccgccatctccagccccttcttctaccaaggtaggtgtcccctgccccccagggaagattcgagacaaggaggaaggaattcagcctttgatgtagcgcagagccccagtcagccaagctgggtcagctgggaggcagctgtggtggggagagcctggagccttgggcagaagggaagagacagggaccccacctgatccaggctctcttcccacagccaggcccagagagctcagtgtccctcctgcagggagcccgcccctttccgttttgctggcccctctgtgagatttcccggggcacccacaacttctcggaggagctcaagatcggggagggtggctttgggtgcgtgtaccgggcggtgatgaggaacacggtgtatgctgtgaagaggctgaaggaggtgagtgtcgcaccctggcagggaccctggaaggccatcagataaccctcaccacttctccagcctttccccctcgcttccccacacaactccttcagccctcattctggcgtagggtccctggccccttggtggttctgggcctcgggtaggtggcactggtggcccgaaggccttcgcttcgagagcctcacgctgcccgtcttccctgccccttcccccaccgcaccctgggggctgcagaacgctgacctggagtggactgcagtgaagcagagcttcctgaccgaggtggagcagctgtccaggtgaggccagagggggagccacaccaggtcccgtggggcttcagaccgcacaccacaggacctggctcccttgggcacctgaggcctggcaggcccgggcgagctgaggccccagccagggctgcccacccagtctggcctgatggaaagtgctcccctttttcaaacaggtttcgtcacccaaacattgtggactttgctggctactgtgctcagaacggcttctactgcctggtgtacggcttcctgcccaacggctccctggaggaccgtctccactgccaggtaggctcacctggcccggcacgcttcccaggacccaaagcactcctgacacctggctggagccgggcgcggggcctagggctttcagcctgtgtgagtgggtcctgccagcaggccaggcctgcacttccagctccccagcagcacccggctcaggatttggcccacggtggggtcaatttttttttttttttttttttttttttttttgaggtggagtcttgctctgtcatccaggctggagtgcagtggtgtgatctcagctcaccacaacctccacctcccgggttcaggcgatcctcctgccgcagcctcccgagtagctgggactacaggcatgcaccaccacacctgcctaatttttgtatttttagtagagatgaggttttgccacattggccaggctagtctcgaactcctgaccccaggtggtctgcgcgcctcagcctcccaaagtgctgggattacaggcgtgagccaccacgcctggcccgacccaatgttttctatagagctctttcccaggcctctcccctttgcaagcagcgtagctggagggtctcatcagcaagccccggaggcgagggggtctggggctaccagctggaccacctacagctgagggagggcccccttgcctcctcctgcatgctgcgtttggggagagcgggaagaatgccttcaaggacttcccgaccaccagggacaaagggatgagccctgggagccgaagcccagcagattctattgaacgtgtccccagccattgcttaagaagtgcaggtcacggagactttgctcctcgttttccagaagggggaaactgaggcctagagagtgaagtggctgttccaggctgcacggtgacaggtagaaggatggttgggatcaaggaacggccatccagcaacctcccctgtccccctttgccaccccagacccaggcctgcccacctctctcctggcctcagcgactggacatccttctgggtacagcccgggcaattcagtttctacatcaggacagccccagcctcatccatggagacatcaagaggtgaggaggggcccttgagaactgccggggcagggcctgcagcaaggggggccccgcgtcctatcaatgtggggatcaggcatggcctgggacctcaacaccccggcatcgcacaggtgtgggaacgggccaaggatgggccctactgatgagcagaggcccccaggcagctggagcgctcagggcagtgccagcgctttctgtgggcaaggcaccgggctggcagcctcgagtccagccttatctaagccgggcaggtgtaggagctaggaccgggctgacgccactgtcttctctccccaagttccaacgtccttctggatgagaggctgacacccaagctgggagactttggcctggcccggttcagccgctttgccgggtccagccccagccagagcagcatggtggcccggacacagacagtgcggggcaccctggcctacctgcccgaggagtacatcaagacgggaaggctggctgtggacacggacaccttcagctttggggtggtgagccactgacccctctgctggctcagaggaggagaagccacaggcaggcagaggtgggggctgcagagtgcactgcgggccaggggccatctgccaagaccccaggaggctgcagctccagggtccccctccctccgaggccctcctcctcaccctgcacctaactgtgtgtttgta

SEQ ID NO: 1082 - DNA, 4046 bp, Homo sapiens
ctaggggtggggaaccccttcgctgtcaggatcaagagggcaaggggaactgtcgctggaggagacatccagctggagaaacaaaagagtaagtctgcgttgctgcttgtggggtcttccccatctcagggcggggaccgggggtggcggtccagacaagtaatcaaggacgatgcccaggaggggacaggtacggggtggcaggagctctgccggcgggctcaggaagccttcaccacagctgcctgagctcacccttgccaaatgagggctggggcagcagcaacgcatacactcacggctgtggcgggcagcgttctcggcatatttcaggacacctaaggagactgaatggctcaaggctgctgccgtgtgcagggggctagacgtggggcgggcaggcagggctcctggtaacagccctgcaggccgcagtggagagcagggttccggcagggccgcccaggagctttcggaaggcccggccccggcccctttccgagcagcccgggcctccgccctgccctctgtccccaacgccgggagccgccgttcgtcctccagagccccgcccgggcgagcccgggaggccgatcgccgctcgcggaacccgccgggacccgggccctccccggcgcggggcgcccccgtgtgacccagcgcgcggccgcggcgcgcaagatggcggcgggcccgggcaccgccccttccgccccgccgggcgtcgcacgaggccggctcgaaggggaagtgagtcagtgtccgcggacccggccggcccaggcccgcgcccgccgcggccctgagaggccccggcaggtcccggcccggcggcggcagccatggccggggggccgggcccgggggagcccgcagcccccggcgcccagcacttcttgtacgaggtgccgccctgggtcatgtgccgcttctacaaagtgatggacgccctggagcccgccgactggtgccagttcggtgggtggcggcgggctgccggggggcgggaggcgcgcgggctcctggcgccgacgcctgacgccccccgccccgcagccgccctgatcgtgcgcgaccagaccgagctgcggctgtgcgagcgctccgggcagcgcacggccagcgtcctgtggccctggatcaaccgcaacgcccgtgtggccgacctcgtgcacatcctcacgcacctgcagctgctccgtgcgcgggacatcatcacagcctgtgagcgcgggactccgggcaccccacggctgggaggccggcgggccccacggggctcccccacccgggcctcaaccttcctttccttccttggcgtcccagggcaccctcccgccccgcttccgtccccaggcaccactgccccgaggcccagcagcatccctgcacccgccgaggccgaggcctggagcccccggaagttgccatcctcagcctccaccttcctctccccaggtaagagggcccggttgttaggctcggtggacccaaagaagagcccaccttgaccacggccacggctgtagaccctgctgctggtctctgcctgcctctcactggtgtctttatgaagcttttccaggctcccagacccattcagggcctgagctcggcctggtcccaagccctgcttccctgtggcctccaccgccatctccagccccttcttctaccaaggtaggtgtcccctgccccccagggaagattcgagacaaggaggaaggaattcagcctttgatgtagcgcagagccccagtcagccaagctgggtcagctgggaggcagctgtggtggggagagcctggagccttgggcagaagggaagagacagggaccccacctgatccaggctctcttcccacagccaggcccagagagctcagtgtccctcctgcagggagcccgcccctttccgttttgctggcccctctgtgagatttcccggggcacccacaacttctcggaggagctcaagatcggggagggtggctttgggtgcgtgtaccgggcggtgatgaggaacacggtgtatgctgtgaagaggctgaaggaggtgagtgtcgcaccctggcagggaccctggaaggccatcagataaccctcaccacttctccagcctttccccctcgcttccccacacaactccttcagccctcattctggcgtagggtccctggccccttggtggttctgggcctcgggtaggtggcactggtggcccgaaggccttcgcttcgagagcctcacgctgcccgtcttccctgccccttcccccaccgcaccctgggggctgcagaacgctgacctggagtggactgcagtgaagcagagcttcctgaccgaggtggagcagctgtccaggtgaggccagagggggagccacaccaggtcccgtggggcttcagaccgcacaccacaggacctggctcccttgggcacctgaggcctggcaggcccgggcgagctgaggccccagccagggctgcccacccagtctggcctgatggaaagtgctcccctttttcaaacaggtttcgtcacccaaacattgtggactttgctggctactgtgctcagaacggcttctactgcctggtgtacggcttcctgcccaacggctccctggaggaccgtctccactgccaggtaggctcacctggcccggcacgcttcccaggacccaaagcactcctgacacctggctggagccgggcgcggggcctagggctttcagcctgtgtgagtgggtcctgccagcaggccaggcctgcacttccagctccccagcagcacccggctcaggatttggcccacggtggggtcaatttttttttttttttttttttttttttttttgaggtggagtcttgctctgtcatccaggctggagtgcagtggtgtgatctcagctcaccacaacctccacctcccgggttcaggcgatcctcctgccgcagcctcccgagtagctgggactacaggcatgcaccaccacacctgcctaatttttgtatttttagtagagatgaggttttgccacattggccaggctagtctcgaactcctgaccccaggtggtctgcgcgcctcagcctcccaaagtgctgggattacaggcgtgagccaccacgcctggcccgacccaatgttttctatagagctctttcccaggcctctcccctttgcaagcagcgtagctggagggtctcatcagcaagccccggaggcgagggggtctggggctaccagctggaccacctacagctgagggagggcccccttgcctcctcctgcatgctgcgtttggggagagcgggaagaatgccttcaaggacttcccgaccaccagggacaaagggatgagccctgggagccgaagcccagcagattctattgaacgtgtccccagccattgcttaagaagtgcaggtcacggagactttgctcctcgttttccagaagggggaaactgaggcctagagagtgaagtggctgttccaggctgcacggtgacaggtagaaggatggttgggatcaaggaacggccatccagcaacctcccctgtccccctttgccaccccagacccaggcctgcccacctctctcctggcctcagcgactggacatccttctgggtacagcccgggcaattcagtttctacatcaggacagccccagcctcatccatggagacatcaagaggtgaggaggggcccttgagaactgccggggcagggcctgcagcaaggggggccccgcgtcctatcaatgtggggatcaggcatggcctgggacctcaacaccccggcatcgcacaggtgtgggaacgggccaaggatgggccctactgatgagcagaggcccccaggcagctggagcgctcagggcagtgccagcgctttctgtgggcaaggcaccgggctggcagcctcgagtccagccttatctaagccgggcaggtgtaggagctaggaccgggctgacgccactgtcttctctccccaagttccaacgtccttctggatgagaggctgacacccaa

SEQ ID NO: 1083 - DNA, 4048 bp, Homo sapiens
acctgctgaagtccggaacgtagtcggcacagcctggtcgccttccacctctgggagctggagtccactggggtggcctgactcccccagtccccttcccgtgacctggtcagggtgagcccatgtggagtcagcctcgcaggcctccctgccagtagggtccgagtgtgtttcatccttcccactctgtcgagcctgggggctggagcggagacgggaggcctggcctgtctcggaacctgtgagctgcaccaggtagaacgccagggaccccagaatcatgtgcgtcagtccaaggggtcccctccaggagtagtgaagactccagaaatgtccctttcttctcccccatcctacgagtaattgcatttgcttttgtaattcttaatgagcaatatctgctagagagtttagctgtaacagttctttttgatcatctttttttaataattagaaacaccaaaaaaatccagaaacttgttcttccaaagcagagagcattataatcaccagggccaaaagcttccctccctgctgtcattgcttcttctgaggcctgaatccaaaagaaaaacagccataggccctttcagtggccgggctacccgtgagcccttcggaggaccagggctggggcagcctctgggcccacatccggggccagctccggcgtgtgttcagtgttagcagtgggtcatgatgctctttcccacccagcctgggataggggcagaggaggcgaggaggccgttgccgctgatgtttggccgtgaacaggtgggtgtctgcgtgcgtccacgtgcgtgttttctgactgacatgaaatcgacgcccgagttagcctcacccggtgacctctagccctgcccggatggagcggggcccacccggttcagtgtttctggggagctggacagtggagtgcaaaaggcttgcagaacttgaagcctgctccttcccttgctaccacggcctcctttccgtttgatttgtcactgcttcaatcaataacagccgctccagagtcagtagtcaatgaatatatgaccaaatatcaccaggactgttactcaatgtgtgccgagcccttgcccatgctgggctcccgtgtatctggacactgtaacgtgtgctgtgtttgctccccttccccttccttctttgccctttacttgtctttctggggtttttctgtttgggtttggtttggtttttatttctccttttgtgttccaaacatgaggttctctctactggtcctcttaactgtggtgttgaggcttatatttgtgtaatttttggtgggtgaaaggaattttgctaagtaaatctcttctgtgtttgaactgaagtctgtattgtaactatgtttaaagtaattgttccagagacaaatatttctagacactttttctttacaaacaaaagcattcggagggagggggatggtgactgagatgagaggggagagctgaacagatgacccctgcccagatcagccagaagccacccaaagcagtggagcccaggagtcccactccaagccagcaagccgaatagctgatgtgttgccactttccaagtcactgcaaaaccaggttttgttccgcccagtggattcttgttttgcttcccctccccccgagattattaccaccatcccgtgcttttaaggaaaggcaagattgatgtttccttgaggggagccaggaggggatgtgtgtgtgcagagctgaagagctggggagaatggggctgggcccacccaagcaggaggctgggacgctctgctgtgggcacaggtcaggctaatgttggcagatgcagctcttcctggacaggccaggtggtgggcattctctctccaaggtgtgccccgtgggcattactgtttaagacacttccgtcacatcccaccccatcctccagggctcaacactgtgacatctctattccccaccctccccttcccagggcaataaaatgaccatggagggggcttgcactctcttggctgtcacccgatcgccagcaaaacttagatgtgagaaaaccccttcccattccatggcgaaaacatctccttagaaaagccattaccctcattaggcatggttttgggctcccaaaacacctgacagcccctccctcctctgagaggcggagagtgctgactgtagtgaccattgcatgccgggtgcagcatctggaagagctaggcagggtgtctgccccctcctgagttgaagtcatgctcccctgtgccagcccagaggccgagagctatggacagcattgccagtaacacaggccaccctgtgcagaagggagctggctccagcctggaaacctgtctgaggttgggagaggtgcacttggggcacagggagaggccgggacacacttagctggagatgtctctaaaagccctgtatcgtattcaccttcagtttttgtgttttgggacaattactttagaaaataagtaggtcgttttaaaaacaaaaattattgattgcttttttgtagtgttcagaaaaaaggttctttgtgtatagccaaatgactgaaagcactgatatatttaaaaacaaaaggcaatttattaaggaaatttgtaccatttcagtaaacctgtctgaatgtacctgtatacgtttcaaaaacaccccccccccactgaatccctgtaacctatttattatataaagagtttgccttataaatttacataaaaatgtccgtttgtgtcttttgttgtaaaaatcaagtgattttttcataaggttcttttactattggaaaagatgggcagcacgcagttttattttatttttgtaagttttttaatacatgtgaaagcaaagaatactcagcatgcctttctaagtgacgcgtttgcaccttttgttgggaagtactgtatcctgtgctgttagcattctcgataaatctctctgtgaaagtgactcaaggtctgggctttcattataagacagaagtccccctccagctcacatgacagcatggtgctgcgtttcctcattggatctggctgtccctggacacaggtagctgccttcaggcctgccacgagcggccaagggaagcctcctccatatgctggcctcgctggcccctcagcttcttccaagccagtgctctccaggcacactgctccagcgtgtgacgggaagggcctggcatgagtcagcctgcagcacaacctccctgctccagacccgtatggtaggggcaccccctaggtctggatgtgctgtggtgcttttggacacccccacccccgcaggctgtggctcctcctgtgtctcattctggccaggaccctcacgtgccctctgttgactgctaacgtggttctctgaccaggcaagggcaggctgaggggtttgcccaaagggggcccccttgttactggcttccttggctctcaggagcagcctcaccaggttggtaaggggctggaggagacaactgctcaaaggagtccagcttcacatgcacatgctagaaggtaccctcggaaggcctggccttcaaaggtagatcccagggttgaaaagtcaacttgtatgcattgagcatctcgtatgccagccctgttccgtgagctgatgggcctttgtgtgtaagtaggaccaagtgcccccgtggaggttagcatgggtgtgcagtcatttcagatacttgagttggtacatctcagtaaagtctgtcccgtgagaagccatgggtttcatggtatggttggcatcttccttgggagtggccacagtggtggtggcttcaggaaagagactccaacaggggccagctgtgggccttgggcacttctcgtttctaggaaaagtcctaagtctgtagggctaggggtggggaaccccttcgctgtcaggatcaagagggcaaggggaactgtcgctggaggagacatccagctggagaaacaaaagagtaagtctgcgttgctgcttgtggggtcttccccatctcagggcggggaccgggggtggcggtccagacaagt

SEQ ID NO: 1084 - DNA, 4041 bp, Homo sapiens
ggcagagcccagaccctggaggaaatcctacctttgaattcaagaacatttggggaatttggaaatctctttgcccccaaacccccattctgtcctacctttaatcaggtcctgctcagcagtgagagcagatgaggtgaaaaggccaagaggtttggctcctgcccactgatagcccctctccccgcagtgtttgtgtgtcaagtggcaaagctgttcttcctggtgaccctgattatatccagtaacacatagactgtgcgcataggcctgctttgtctcctctatcctgggcttttgttttgctttttagttttgcttttagtttttctgtcccttttatttaacgcaccgactagacacacaaagcagttgaatttttatatatatatctgtatattgcacaattataaactcattttgcttgtggctccacacacacaaaaaaagacctgttaaaattatacctgttgcttaattacaatatttctgataaccatagcataggacaagggaaaataaaaaaagaaaaaaaagaaaaaaaaacgacaaatctgtctgctggtcacttcttctgtccaagcagattcgtggtcttttcctcgcttctttcaagggctttcctgtgccaggtgaaggaggctccaggcagcacccaggttttgcactcttgtttctcccgtgcttgtgaaagaggtcccaaggttctgggtgcaggagcgctcccttgacctgctgaagtccggaacgtagtcggcacagcctggtcgccttccacctctgggagctggagtccactggggtggcctgactcccccagtccccttcccgtgacctggtcagggtgagcccatgtggagtcagcctcgcaggcctccctgccagtagggtccgagtgtgtttcatccttcccactctgtcgagcctgggggctggagcggagacgggaggcctggcctgtctcggaacctgtgagctgcaccaggtagaacgccagggaccccagaatcatgtgcgtcagtccaaggggtcccctccaggagtagtgaagactccagaaatgtccctttcttctcccccatcctacgagtaattgcatttgcttttgtaattcttaatgagcaatatctgctagagagtttagctgtaacagttctttttgatcatctttttttaataattagaaacaccaaaaaaatccagaaacttgttcttccaaagcagagagcattataatcaccagggccaaaagcttccctccctgctgtcattgcttcttctgaggcctgaatccaaaagaaaaacagccataggccctttcagtggccgggctacccgtgagcccttcggaggaccagggctggggcagcctctgggcccacatccggggccagctccggcgtgtgttcagtgttagcagtgggtcatgatgctctttcccacccagcctgggataggggcagaggaggcgaggaggccgttgccgctgatgtttggccgtgaacaggtgggtgtctgcgtgcgtccacgtgcgtgttttctgactgacatgaaatcgacgcccgagttagcctcacccggtgacctctagccctgcccggatggagcggggcccacccggttcagtgtttctggggagctggacagtggagtgcaaaaggcttgcagaacttgaagcctgctccttcccttgctaccacggcctcctttccgtttgatttgtcactgcttcaatcaataacagccgctccagagtcagtagtcaatgaatatatgaccaaatatcaccaggactgttactcaatgtgtgccgagcccttgcccatgctgggctcccgtgtatctggacactgtaacgtgtgctgtgtttgctccccttccccttccttctttgccctttacttgtctttctggggtttttctgtttgggtttggtttggtttttatttctccttttgtgttccaaacatgaggttctctctactggtcctcttaactgtggtgttgaggcttatatttgtgtaatttttggtgggtgaaaggaattttgctaagtaaatctcttctgtgtttgaactgaagtctgtattgtaactatgtttaaagtaattgttccagagacaaatatttctagacactttttctttacaaacaaaagcattcggagggagggggatggtgactgagatgagaggggagagctgaacagatgacccctgcccagatcagccagaagccacccaaagcagtggagcccaggagtcccactccaagccagcaagccgaatagctgatgtgttgccactttccaagtcactgcaaaaccaggttttgttccgcccagtggattcttgttttgcttcccctccccccgagattattaccaccatcccgtgcttttaaggaaaggcaagattgatgtttccttgaggggagccaggaggggatgtgtgtgtgcagagctgaagagctggggagaatggggctgggcccacccaagcaggaggctgggacgctctgctgtgggcacaggtcaggctaatgttggcagatgcagctcttcctggacaggccaggtggtgggcattctctctccaaggtgtgccccgtgggcattactgtttaagacacttccgtcacatcccaccccatcctccagggctcaacactgtgacatctctattccccaccctccccttcccagggcaataaaatgaccatggagggggcttgcactctcttggctgtcacccgatcgccagcaaaacttagatgtgagaaaaccccttcccattccatggcgaaaacatctccttagaaaagccattaccctcattaggcatggttttgggctcccaaaacacctgacagcccctccctcctctgagaggcggagagtgctgactgtagtgaccattgcatgccgggtgcagcatctggaagagctaggcagggtgtctgccccctcctgagttgaagtcatgctcccctgtgccagcccagaggccgagagctatggacagcattgccagtaacacaggccaccctgtgcagaagggagctggctccagcctggaaacctgtctgaggttgggagaggtgcacttggggcacagggagaggccgggacacacttagctggagatgtctctaaaagccctgtatcgtattcaccttcagtttttgtgttttgggacaattactttagaaaataagtaggtcgttttaaaaacaaaaattattgattgcttttttgtagtgttcagaaaaaaggttctttgtgtatagccaaatgactgaaagcactgatatatttaaaaacaaaaggcaatttattaaggaaatttgtaccatttcagtaaacctgtctgaatgtacctgtatacgtttcaaaaacaccccccccccactgaatccctgtaacctatttattatataaagagtttgccttataaatttacataaaaatgtccgtttgtgtcttttgttgtaaaaatcaagtgattttttcataaggttcttttactattggaaaagatgggcagcacgcagttttattttatttttgtaagttttttaatacatgtgaaagcaaagaatactcagcatgcctttctaagtgacgcgtttgcaccttttgttgggaagtactgtatcctgtgctgttagcattctcgataaatctctctgtgaaagtgactcaaggtctgggctttcattataagacagaagtccccctccagctcacatgacagcatggtgctgcgtttcctcattggatctggctgtccctggacacaggtagctgccttcaggcctgccacgagcggccaagggaagcctcctccatatgctggcctcgctggcccctcagcttcttccaagccagtgctctccaggcacactgctccagcgtgtgacgggaagggcctggcatgagtcagcctgcagcacaacctccctgctccagacccgtatggtaggggcaccccctaggtctggatgtgctgtggtgcttttggacacccccacccccgcagg

SEQ ID NO: 1085 - DNA, 4047 bp, Homo sapiens
caaactagccaacggccccagcttctcagctcgctggatggcggaagctgctactcgtgagcgccagtgcgggtgcagacaatcttctgttgggtggcatcattccaggcccgaagcatgaacagtgcacctgggacagggagcagccccaaattgtcacctgcttctctgcccagcttttcattgctgtgacagtgatggcgaaagagggtaataaccagacacaaactgccaagttgggtggagaaaggagtttctttagctgacagaatctctgaattttaaatcacttagtaagcggctcaagcccaggagggagcagagggatacgagcggagtcccctgcgcgggaccatctggaattggtttagcccaagtggagcctgacagccagaactctgtgtcccccgtctaaccacagctccttttccagagcattccagtcaggctctctgggctgactgggccaggggaggttacaggtaccagttctttaagaagatctttgggcatatacatttttagcctgtgtcattgccccaaatggattcctgtttcaagttcacacctgcagattctaggacctgtgtcctagacttcagggagtcagctgtttctagagttcctaccatggagtgggtctggaggacctgcccggtgggggggcagagccctgctccctccgggtcttcctactcttctctctgctctgacgggatttgttgattctctccattttggtgtctttctcttttagatattgtatcaatctttagaaaaggcatagtctacttgttataaatcgttaggatactgcctcccccagggtctaaaattacatattagaggggaaaagctgaacactgaagtcagttctcaacaatttagaaggaaaacctagaaaacatttggcagaaaattacatttcgatgtttttgaatgaatacgagcaagcttttacaacagtgctgatctaaaaatacttagcacttggcctgagatgcctggtgagcattacaggcaaggggaatctggaggtagccgacctgaggacatggcttctgaacctgtcttttgggagtggtatggaaggtggagcgttcaccagtgacctggaaggcccagcaccaccctccttcccactcttctcatcttgacagagcctgccccagcgctgacgtgtcaggaaaacacccagggaactaggaaggcacttctgcctgaggggcagcctgccttgcccactcctgctctgctcgcctcggatcagctgagccttctgagctggcctctcactgcctccccaaggccccctgcctgccctgtcaggaggcagaaggaagcaggtgtgagggcagtgcaaggagggagcacaacccccagctcccgctccgggctccgacttgtgcacaggcagagcccagaccctggaggaaatcctacctttgaattcaagaacatttggggaatttggaaatctctttgcccccaaacccccattctgtcctacctttaatcaggtcctgctcagcagtgagagcagatgaggtgaaaaggccaagaggtttggctcctgcccactgatagcccctctccccgcagtgtttgtgtgtcaagtggcaaagctgttcttcctggtgaccctgattatatccagtaacacatagactgtgcgcataggcctgctttgtctcctctatcctgggcttttgttttgctttttagttttgcttttagtttttctgtcccttttatttaacgcaccgactagacacacaaagcagttgaatttttatatatatatctgtatattgcacaattataaactcattttgcttgtggctccacacacacaaaaaaagacctgttaaaattatacctgttgcttaattacaatatttctgataaccatagcataggacaagggaaaataaaaaaagaaaaaaaagaaaaaaaaacgacaaatctgtctgctggtcacttcttctgtccaagcagattcgtggtcttttcctcgcttctttcaagggctttcctgtgccaggtgaaggaggctccaggcagcacccaggttttgcactcttgtttctcccgtgcttgtgaaagaggtcccaaggttctgggtgcaggagcgctcccttgacctgctgaagtccggaacgtagtcggcacagcctggtcgccttccacctctgggagctggagtccactggggtggcctgactcccccagtccccttcccgtgacctggtcagggtgagcccatgtggagtcagcctcgcaggcctccctgccagtagggtccgagtgtgtttcatccttcccactctgtcgagcctgggggctggagcggagacgggaggcctggcctgtctcggaacctgtgagctgcaccaggtagaacgccagggaccccagaatcatgtgcgtcagtccaaggggtcccctccaggagtagtgaagactccagaaatgtccctttcttctcccccatcctacgagtaattgcatttgcttttgtaattcttaatgagcaatatctgctagagagtttagctgtaacagttctttttgatcatctttttttaataattagaaacaccaaaaaaatccagaaacttgttcttccaaagcagagagcattataatcaccagggccaaaagcttccctccctgctgtcattgcttcttctgaggcctgaatccaaaagaaaaacagccataggccctttcagtggccgggctacccgtgagcccttcggaggaccagggctggggcagcctctgggcccacatccggggccagctccggcgtgtgttcagtgttagcagtgggtcatgatgctctttcccacccagcctgggataggggcagaggaggcgaggaggccgttgccgctgatgtttggccgtgaacaggtgggtgtctgcgtgcgtccacgtgcgtgttttctgactgacatgaaatcgacgcccgagttagcctcacccggtgacctctagccctgcccggatggagcggggcccacccggttcagtgtttctggggagctggacagtggagtgcaaaaggcttgcagaacttgaagcctgctccttcccttgctaccacggcctcctttccgtttgatttgtcactgcttcaatcaataacagccgctccagagtcagtagtcaatgaatatatgaccaaatatcaccaggactgttactcaatgtgtgccgagcccttgcccatgctgggctcccgtgtatctggacactgtaacgtgtgctgtgtttgctccccttccccttccttctttgccctttacttgtctttctggggtttttctgtttgggtttggtttggtttttatttctccttttgtgttccaaacatgaggttctctctactggtcctcttaactgtggtgttgaggcttatatttgtgtaatttttggtgggtgaaaggaattttgctaagtaaatctcttctgtgtttgaactgaagtctgtattgtaactatgtttaaagtaattgttccagagacaaatatttctagacactttttctttacaaacaaaagcattcggagggagggggatggtgactgagatgagaggggagagctgaacagatgacccctgcccagatcagccagaagccacccaaagcagtggagcccaggagtcccactccaagccagcaagccgaatagctgatgtgttgccactttccaagtcactgcaaaaccaggttttgttccgcccagtggattcttgttttgcttcccctccccccgagattattaccaccatcccgtgcttttaaggaaaggcaagattgatgtttccttgaggggagccaggaggggatgtgtgtgtgcagagctgaagagctggggagaatggggctgggcccacccaagcaggaggctgggacgctctgctgtgggcacaggtcaggctaatgttggcagatgcagctcttcctggacaggccaggtggtgggcattctctctccaaggtgtgccccgtgggcattactgtttaagacacttcc

SEQ ID NO: 1086 - DNA, 4047 bp, Homo sapiens
agctcagtgagctggagatacttggtcacagccaggcgctagcacagctcccttctgttgatgctgtattcccatatcaaaagacacaggggacacccagaaacgccacatcccccaatccatcagtgccaaactagccaacggccccagcttctcagctcgctggatggcggaagctgctactcgtgagcgccagtgcgggtgcagacaatcttctgttgggtggcatcattccaggcccgaagcatgaacagtgcacctgggacagggagcagccccaaattgtcacctgcttctctgcccagcttttcattgctgtgacagtgatggcgaaagagggtaataaccagacacaaactgccaagttgggtggagaaaggagtttctttagctgacagaatctctgaattttaaatcacttagtaagcggctcaagcccaggagggagcagagggatacgagcggagtcccctgcgcgggaccatctggaattggtttagcccaagtggagcctgacagccagaactctgtgtcccccgtctaaccacagctccttttccagagcattccagtcaggctctctgggctgactgggccaggggaggttacaggtaccagttctttaagaagatctttgggcatatacatttttagcctgtgtcattgccccaaatggattcctgtttcaagttcacacctgcagattctaggacctgtgtcctagacttcagggagtcagctgtttctagagttcctaccatggagtgggtctggaggacctgcccggtgggggggcagagccctgctccctccgggtcttcctactcttctctctgctctgacgggatttgttgattctctccattttggtgtctttctcttttagatattgtatcaatctttagaaaaggcatagtctacttgttataaatcgttaggatactgcctcccccagggtctaaaattacatattagaggggaaaagctgaacactgaagtcagttctcaacaatttagaaggaaaacctagaaaacatttggcagaaaattacatttcgatgtttttgaatgaatacgagcaagcttttacaacagtgctgatctaaaaatacttagcacttggcctgagatgcctggtgagcattacaggcaaggggaatctggaggtagccgacctgaggacatggcttctgaacctgtcttttgggagtggtatggaaggtggagcgttcaccagtgacctggaaggcccagcaccaccctccttcccactcttctcatcttgacagagcctgccccagcgctgacgtgtcaggaaaacacccagggaactaggaaggcacttctgcctgaggggcagcctgccttgcccactcctgctctgctcgcctcggatcagctgagccttctgagctggcctctcactgcctccccaaggccccctgcctgccctgtcaggaggcagaaggaagcaggtgtgagggcagtgcaaggagggagcacaacccccagctcccgctccgggctccgacttgtgcacaggcagagcccagaccctggaggaaatcctacctttgaattcaagaacatttggggaatttggaaatctctttgcccccaaacccccattctgtcctacctttaatcaggtcctgctcagcagtgagagcagatgaggtgaaaaggccaagaggtttggctcctgcccactgatagcccctctccccgcagtgtttgtgtgtcaagtggcaaagctgttcttcctggtgaccctgattatatccagtaacacatagactgtgcgcataggcctgctttgtctcctctatcctgggcttttgttttgctttttagttttgcttttagtttttctgtcccttttatttaacgcaccgactagacacacaaagcagttgaatttttatatatatatctgtatattgcacaattataaactcattttgcttgtggctccacacacacaaaaaaagacctgttaaaattatacctgttgcttaattacaatatttctgataaccatagcataggacaagggaaaataaaaaaagaaaaaaaagaaaaaaaaacgacaaatctgtctgctggtcacttcttctgtccaagcagattcgtggtcttttcctcgcttctttcaagggctttcctgtgccaggtgaaggaggctccaggcagcacccaggttttgcactcttgtttctcccgtgcttgtgaaagaggtcccaaggttctgggtgcaggagcgctcccttgacctgctgaagtccggaacgtagtcggcacagcctggtcgccttccacctctgggagctggagtccactggggtggcctgactcccccagtccccttcccgtgacctggtcagggtgagcccatgtggagtcagcctcgcaggcctccctgccagtagggtccgagtgtgtttcatccttcccactctgtcgagcctgggggctggagcggagacgggaggcctggcctgtctcggaacctgtgagctgcaccaggtagaacgccagggaccccagaatcatgtgcgtcagtccaaggggtcccctccaggagtagtgaagactccagaaatgtccctttcttctcccccatcctacgagtaattgcatttgcttttgtaattcttaatgagcaatatctgctagagagtttagctgtaacagttctttttgatcatctttttttaataattagaaacaccaaaaaaatccagaaacttgttcttccaaagcagagagcattataatcaccagggccaaaagcttccctccctgctgtcattgcttcttctgaggcctgaatccaaaagaaaaacagccataggccctttcagtggccgggctacccgtgagcccttcggaggaccagggctggggcagcctctgggcccacatccggggccagctccggcgtgtgttcagtgttagcagtgggtcatgatgctctttcccacccagcctgggataggggcagaggaggcgaggaggccgttgccgctgatgtttggccgtgaacaggtgggtgtctgcgtgcgtccacgtgcgtgttttctgactgacatgaaatcgacgcccgagttagcctcacccggtgacctctagccctgcccggatggagcggggcccacccggttcagtgtttctggggagctggacagtggagtgcaaaaggcttgcagaacttgaagcctgctccttcccttgctaccacggcctcctttccgtttgatttgtcactgcttcaatcaataacagccgctccagagtcagtagtcaatgaatatatgaccaaatatcaccaggactgttactcaatgtgtgccgagcccttgcccatgctgggctcccgtgtatctggacactgtaacgtgtgctgtgtttgctccccttccccttccttctttgccctttacttgtctttctggggtttttctgtttgggtttggtttggtttttatttctccttttgtgttccaaacatgaggttctctctactggtcctcttaactgtggtgttgaggcttatatttgtgtaatttttggtgggtgaaaggaattttgctaagtaaatctcttctgtgtttgaactgaagtctgtattgtaactatgtttaaagtaattgttccagagacaaatatttctagacactttttctttacaaacaaaagcattcggagggagggggatggtgactgagatgagaggggagagctgaacagatgacccctgcccagatcagccagaagccacccaaagcagtggagcccaggagtcccactccaagccagcaagccgaatagctgatgtgttgccactttccaagtcactgcaaaaccaggttttgttccgcccagtggattcttgttttgcttcccctccccccgagattattaccaccatcccgtgcttttaaggaaaggcaagattgatgtttccttgaggggagccaggaggggatgtgtgtgtgcagagctgaagagctggggagaatggggctgggcccacccaagcaggag

SEQ ID NO: 1087 - DNA, 4050 bp, Homo sapiens
catccacagtctcccccacccttgttccagttgttagttactacctcctctcctgacaatactgtatgtcgtcgagctccccccaggtctacccctcccggccctgcctgctggtgggcttgtcatagccagtgggattgccggtcttgacagctcagtgagctggagatacttggtcacagccaggcgctagcacagctcccttctgttgatgctgtattcccatatcaaaagacacaggggacacccagaaacgccacatcccccaatccatcagtgccaaactagccaacggccccagcttctcagctcgctggatggcggaagctgctactcgtgagcgccagtgcgggtgcagacaatcttctgttgggtggcatcattccaggcccgaagcatgaacagtgcacctgggacagggagcagccccaaattgtcacctgcttctctgcccagcttttcattgctgtgacagtgatggcgaaagagggtaataaccagacacaaactgccaagttgggtggagaaaggagtttctttagctgacagaatctctgaattttaaatcacttagtaagcggctcaagcccaggagggagcagagggatacgagcggagtcccctgcgcgggaccatctggaattggtttagcccaagtggagcctgacagccagaactctgtgtcccccgtctaaccacagctccttttccagagcattccagtcaggctctctgggctgactgggccaggggaggttacaggtaccagttctttaagaagatctttgggcatatacatttttagcctgtgtcattgccccaaatggattcctgtttcaagttcacacctgcagattctaggacctgtgtcctagacttcagggagtcagctgtttctagagttcctaccatggagtgggtctggaggacctgcccggtgggggggcagagccctgctccctccgggtcttcctactcttctctctgctctgacgggatttgttgattctctccattttggtgtctttctcttttagatattgtatcaatctttagaaaaggcatagtctacttgttataaatcgttaggatactgcctcccccagggtctaaaattacatattagaggggaaaagctgaacactgaagtcagttctcaacaatttagaaggaaaacctagaaaacatttggcagaaaattacatttcgatgtttttgaatgaatacgagcaagcttttacaacagtgctgatctaaaaatacttagcacttggcctgagatgcctggtgagcattacaggcaaggggaatctggaggtagccgacctgaggacatggcttctgaacctgtcttttgggagtggtatggaaggtggagcgttcaccagtgacctggaaggcccagcaccaccctccttcccactcttctcatcttgacagagcctgccccagcgctgacgtgtcaggaaaacacccagggaactaggaaggcacttctgcctgaggggcagcctgccttgcccactcctgctctgctcgcctcggatcagctgagccttctgagctggcctctcactgcctccccaaggccccctgcctgccctgtcaggaggcagaaggaagcaggtgtgagggcagtgcaaggagggagcacaacccccagctcccgctccgggctccgacttgtgcacaggcagagcccagaccctggaggaaatcctacctttgaattcaagaacatttggggaatttggaaatctctttgcccccaaacccccattctgtcctacctttaatcaggtcctgctcagcagtgagagcagatgaggtgaaaaggccaagaggtttggctcctgcccactgatagcccctctccccgcagtgtttgtgtgtcaagtggcaaagctgttcttcctggtgaccctgattatatccagtaacacatagactgtgcgcataggcctgctttgtctcctctatcctgggcttttgttttgctttttagttttgcttttagtttttctgtcccttttatttaacgcaccgactagacacacaaagcagttgaatttttatatatatatctgtatattgcacaattataaactcattttgcttgtggctccacacacacaaaaaaagacctgttaaaattatacctgttgcttaattacaatatttctgataaccatagcataggacaagggaaaataaaaaaagaaaaaaaagaaaaaaaaacgacaaatctgtctgctggtcacttcttctgtccaagcagattcgtggtcttttcctcgcttctttcaagggctttcctgtgccaggtgaaggaggctccaggcagcacccaggttttgcactcttgtttctcccgtgcttgtgaaagaggtcccaaggttctgggtgcaggagcgctcccttgacctgctgaagtccggaacgtagtcggcacagcctggtcgccttccacctctgggagctggagtccactggggtggcctgactcccccagtccccttcccgtgacctggtcagggtgagcccatgtggagtcagcctcgcaggcctccctgccagtagggtccgagtgtgtttcatccttcccactctgtcgagcctgggggctggagcggagacgggaggcctggcctgtctcggaacctgtgagctgcaccaggtagaacgccagggaccccagaatcatgtgcgtcagtccaaggggtcccctccaggagtagtgaagactccagaaatgtccctttcttctcccccatcctacgagtaattgcatttgcttttgtaattcttaatgagcaatatctgctagagagtttagctgtaacagttctttttgatcatctttttttaataattagaaacaccaaaaaaatccagaaacttgttcttccaaagcagagagcattataatcaccagggccaaaagcttccctccctgctgtcattgcttcttctgaggcctgaatccaaaagaaaaacagccataggccctttcagtggccgggctacccgtgagcccttcggaggaccagggctggggcagcctctgggcccacatccggggccagctccggcgtgtgttcagtgttagcagtgggtcatgatgctctttcccacccagcctgggataggggcagaggaggcgaggaggccgttgccgctgatgtttggccgtgaacaggtgggtgtctgcgtgcgtccacgtgcgtgttttctgactgacatgaaatcgacgcccgagttagcctcacccggtgacctctagccctgcccggatggagcggggcccacccggttcagtgtttctggggagctggacagtggagtgcaaaaggcttgcagaacttgaagcctgctccttcccttgctaccacggcctcctttccgtttgatttgtcactgcttcaatcaataacagccgctccagagtcagtagtcaatgaatatatgaccaaatatcaccaggactgttactcaatgtgtgccgagcccttgcccatgctgggctcccgtgtatctggacactgtaacgtgtgctgtgtttgctccccttccccttccttctttgccctttacttgtctttctggggtttttctgtttgggtttggtttggtttttatttctccttttgtgttccaaacatgaggttctctctactggtcctcttaactgtggtgttgaggcttatatttgtgtaatttttggtgggtgaaaggaattttgctaagtaaatctcttctgtgtttgaactgaagtctgtattgtaactatgtttaaagtaattgttccagagacaaatatttctagacactttttctttacaaacaaaagcattcggagggagggggatggtgactgagatgagaggggagagctgaacagatgacccctgcccagatcagccagaagccacccaaagcagtggagcccaggagtcccactccaagccagcaagccgaatagctgatgtgttgccactttccaagtcactgcaaaaccaggttttgttccgcccagtggattcttgtttt

SEQ ID NO: 1088 - DNA, 4048 bp, Homo sapiens
ctgtcaagtgtgtgttgtcttgtgtatttcagttattgtccctggcttccttactatggtgtaatcatgaaggagtgaaacatcatagaaactgtctagcacttccttgccagtctttagtgatcaggaaccatagttgacagttccaatcagtagcttaagaaaaaaccgtgtttgtctcttctggaatggttagaagtgagggagtttgccccgttctgtttgtagagtctcatagttggactttctagcatatatgtgtccatttccttatgctgtaaaagcaagtcctgcaaccaaactcccatcagcccaatccctgatccctgatcccttccacctgctctgctgatgacccccccagcttcacttctgactcttccccaggaagggaaggggggtcagaagagagggtgagtcctccagaactcttcctccaaggacagaaggctcctgcccccatagtggcctcgaactcctggcactaccaaaggacacttatccacgagagcgcagcatccgaccaggttgtcactgagaagatgtttattttggtcagttgggtttttatgtattatacttagtcaaatgtaatgtggcttctggaatcattgtccagagctgcttccccgtcacctgggcgtcatctggtcctggtaagaggagtgcgtggcccaccaggcccccctgtcacccatgacagttcattcagggccgatggggcagtcgtggttgggaacacagcatttcaagcgtcactttatttcattcgggccccacctgcagctccctcaaagaggcagttgcccagcctctttcccttccagtttattccagagctgccagtggggcctgaggctccttagggttttctctctatttccccctttcttcctcattccctcgtctttcccaaaggcatcacgagtcagtcgcctttcagcaggcagccttggcggtttatcgccctggcaggcaggggccctgcagctctcatgctgcccctgccttggggtcaggttgacaggaggttggagggaaagccttaagctgcaggattctcaccagctgtgtccggcccagttttggggtgtgacctcaatttcaattttgtctgtacttgaacattatgaagatgggggcctctttcagtgaatttgtgaacagcagaattgaccgacagctttccagtacccatggggctaggtcattaaggccacatccacagtctcccccacccttgttccagttgttagttactacctcctctcctgacaatactgtatgtcgtcgagctccccccaggtctacccctcccggccctgcctgctggtgggcttgtcatagccagtgggattgccggtcttgacagctcagtgagctggagatacttggtcacagccaggcgctagcacagctcccttctgttgatgctgtattcccatatcaaaagacacaggggacacccagaaacgccacatcccccaatccatcagtgccaaactagccaacggccccagcttctcagctcgctggatggcggaagctgctactcgtgagcgccagtgcgggtgcagacaatcttctgttgggtggcatcattccaggcccgaagcatgaacagtgcacctgggacagggagcagccccaaattgtcacctgcttctctgcccagcttttcattgctgtgacagtgatggcgaaagagggtaataaccagacacaaactgccaagttgggtggagaaaggagtttctttagctgacagaatctctgaattttaaatcacttagtaagcggctcaagcccaggagggagcagagggatacgagcggagtcccctgcgcgggaccatctggaattggtttagcccaagtggagcctgacagccagaactctgtgtcccccgtctaaccacagctccttttccagagcattccagtcaggctctctgggctgactgggccaggggaggttacaggtaccagttctttaagaagatctttgggcatatacatttttagcctgtgtcattgccccaaatggattcctgtttcaagttcacacctgcagattctaggacctgtgtcctagacttcagggagtcagctgtttctagagttcctaccatggagtgggtctggaggacctgcccggtgggggggcagagccctgctccctccgggtcttcctactcttctctctgctctgacgggatttgttgattctctccattttggtgtctttctcttttagatattgtatcaatctttagaaaaggcatagtctacttgttataaatcgttaggatactgcctcccccagggtctaaaattacatattagaggggaaaagctgaacactgaagtcagttctcaacaatttagaaggaaaacctagaaaacatttggcagaaaattacatttcgatgtttttgaatgaatacgagcaagcttttacaacagtgctgatctaaaaatacttagcacttggcctgagatgcctggtgagcattacaggcaaggggaatctggaggtagccgacctgaggacatggcttctgaacctgtcttttgggagtggtatggaaggtggagcgttcaccagtgacctggaaggcccagcaccaccctccttcccactcttctcatcttgacagagcctgccccagcgctgacgtgtcaggaaaacacccagggaactaggaaggcacttctgcctgaggggcagcctgccttgcccactcctgctctgctcgcctcggatcagctgagccttctgagctggcctctcactgcctccccaaggccccctgcctgccctgtcaggaggcagaaggaagcaggtgtgagggcagtgcaaggagggagcacaacccccagctcccgctccgggctccgacttgtgcacaggcagagcccagaccctggaggaaatcctacctttgaattcaagaacatttggggaatttggaaatctctttgcccccaaacccccattctgtcctacctttaatcaggtcctgctcagcagtgagagcagatgaggtgaaaaggccaagaggtttggctcctgcccactgatagcccctctccccgcagtgtttgtgtgtcaagtggcaaagctgttcttcctggtgaccctgattatatccagtaacacatagactgtgcgcataggcctgctttgtctcctctatcctgggcttttgttttgctttttagttttgcttttagtttttctgtcccttttatttaacgcaccgactagacacacaaagcagttgaatttttatatatatatctgtatattgcacaattataaactcattttgcttgtggctccacacacacaaaaaaagacctgttaaaattatacctgttgcttaattacaatatttctgataaccatagcataggacaagggaaaataaaaaaagaaaaaaaagaaaaaaaaacgacaaatctgtctgctggtcacttcttctgtccaagcagattcgtggtcttttcctcgcttctttcaagggctttcctgtgccaggtgaaggaggctccaggcagcacccaggttttgcactcttgtttctcccgtgcttgtgaaagaggtcccaaggttctgggtgcaggagcgctcccttgacctgctgaagtccggaacgtagtcggcacagcctggtcgccttccacctctgggagctggagtccactggggtggcctgactcccccagtccccttcccgtgacctggtcagggtgagcccatgtggagtcagcctcgcaggcctccctgccagtagggtccgagtgtgtttcatccttcccactctgtcgagcctgggggctggagcggagacgggaggcctggcctgtctcggaacctgtgagctgcaccaggtagaacgccagggaccccagaatcatgtgcgtcagtccaaggggtcccctccaggagtagtgaagactccagaaatgtccctttcttctcccccatcctacgagtaattgcatttgcttttgtaattcttaatgagcaatatctgctagag

SEQ ID NO: 1089 - DNA, 4050 bp, Homo sapiens
gtgaagagcaagagagcagcaaggtcttgctctcctaggtagccccctcttccctggtaagaaaaagcaaaaggcatttcccaccctgaacaacgagccttttcacccttctactctagagaagtggactggaggagctgggcccgatttggtagttgaggaaagcacagaggcctcctgtggcctgccagtcatcgagtggcccaacaggggctccatgccagccgaccttgacctcactcagaagtccagagtctagcgtagtgcagcagggcagtagcggtaccaatgcagaactcccaagacccgagctgggaccagtacctgggtccccagcccttcctctgctcccccttttccctcggagttcttcttgaatggcaatgttttgcttttgctcgatgcagacagggggccagaacaccacacatttcactgtctgtctggtccatagctgtggtgtaggggcttagaggcatgggcttgctgtgggtttttaattgatcagttttcatgtgggatcccatctttttaacctctgttcaggaagtccttatctagctgcatatcttcatcatattggtatatccttttctgtgtttacagagatgtctcttatatctaaatctgtccaactgagaagtaccttatcaaagtagcaaatgagacagcagtcttatgcttccagaaacacccacaggcatgtcccatgtgagctgctgccatgaactgtcaagtgtgtgttgtcttgtgtatttcagttattgtccctggcttccttactatggtgtaatcatgaaggagtgaaacatcatagaaactgtctagcacttccttgccagtctttagtgatcaggaaccatagttgacagttccaatcagtagcttaagaaaaaaccgtgtttgtctcttctggaatggttagaagtgagggagtttgccccgttctgtttgtagagtctcatagttggactttctagcatatatgtgtccatttccttatgctgtaaaagcaagtcctgcaaccaaactcccatcagcccaatccctgatccctgatcccttccacctgctctgctgatgacccccccagcttcacttctgactcttccccaggaagggaaggggggtcagaagagagggtgagtcctccagaactcttcctccaaggacagaaggctcctgcccccatagtggcctcgaactcctggcactaccaaaggacacttatccacgagagcgcagcatccgaccaggttgtcactgagaagatgtttattttggtcagttgggtttttatgtattatacttagtcaaatgtaatgtggcttctggaatcattgtccagagctgcttccccgtcacctgggcgtcatctggtcctggtaagaggagtgcgtggcccaccaggcccccctgtcacccatgacagttcattcagggccgatggggcagtcgtggttgggaacacagcatttcaagcgtcactttatttcattcgggccccacctgcagctccctcaaagaggcagttgcccagcctctttcccttccagtttattccagagctgccagtggggcctgaggctccttagggttttctctctatttccccctttcttcctcattccctcgtctttcccaaaggcatcacgagtcagtcgcctttcagcaggcagccttggcggtttatcgccctggcaggcaggggccctgcagctctcatgctgcccctgccttggggtcaggttgacaggaggttggagggaaagccttaagctgcaggattctcaccagctgtgtccggcccagttttggggtgtgacctcaatttcaattttgtctgtacttgaacattatgaagatgggggcctctttcagtgaatttgtgaacagcagaattgaccgacagctttccagtacccatggggctaggtcattaaggccacatccacagtctcccccacccttgttccagttgttagttactacctcctctcctgacaatactgtatgtcgtcgagctccccccaggtctacccctcccggccctgcctgctggtgggcttgtcatagccagtgggattgccggtcttgacagctcagtgagctggagatacttggtcacagccaggcgctagcacagctcccttctgttgatgctgtattcccatatcaaaagacacaggggacacccagaaacgccacatcccccaatccatcagtgccaaactagccaacggccccagcttctcagctcgctggatggcggaagctgctactcgtgagcgccagtgcgggtgcagacaatcttctgttgggtggcatcattccaggcccgaagcatgaacagtgcacctgggacagggagcagccccaaattgtcacctgcttctctgcccagcttttcattgctgtgacagtgatggcgaaagagggtaataaccagacacaaactgccaagttgggtggagaaaggagtttctttagctgacagaatctctgaattttaaatcacttagtaagcggctcaagcccaggagggagcagagggatacgagcggagtcccctgcgcgggaccatctggaattggtttagcccaagtggagcctgacagccagaactctgtgtcccccgtctaaccacagctccttttccagagcattccagtcaggctctctgggctgactgggccaggggaggttacaggtaccagttctttaagaagatctttgggcatatacatttttagcctgtgtcattgccccaaatggattcctgtttcaagttcacacctgcagattctaggacctgtgtcctagacttcagggagtcagctgtttctagagttcctaccatggagtgggtctggaggacctgcccggtgggggggcagagccctgctccctccgggtcttcctactcttctctctgctctgacgggatttgttgattctctccattttggtgtctttctcttttagatattgtatcaatctttagaaaaggcatagtctacttgttataaatcgttaggatactgcctcccccagggtctaaaattacatattagaggggaaaagctgaacactgaagtcagttctcaacaatttagaaggaaaacctagaaaacatttggcagaaaattacatttcgatgtttttgaatgaatacgagcaagcttttacaacagtgctgatctaaaaatacttagcacttggcctgagatgcctggtgagcattacaggcaaggggaatctggaggtagccgacctgaggacatggcttctgaacctgtcttttgggagtggtatggaaggtggagcgttcaccagtgacctggaaggcccagcaccaccctccttcccactcttctcatcttgacagagcctgccccagcgctgacgtgtcaggaaaacacccagggaactaggaaggcacttctgcctgaggggcagcctgccttgcccactcctgctctgctcgcctcggatcagctgagccttctgagctggcctctcactgcctccccaaggccccctgcctgccctgtcaggaggcagaaggaagcaggtgtgagggcagtgcaaggagggagcacaacccccagctcccgctccgggctccgacttgtgcacaggcagagcccagaccctggaggaaatcctacctttgaattcaagaacatttggggaatttggaaatctctttgcccccaaacccccattctgtcctacctttaatcaggtcctgctcagcagtgagagcagatgaggtgaaaaggccaagaggtttggctcctgcccactgatagcccctctccccgcagtgtttgtgtgtcaagtggcaaagctgttcttcctggtgaccctgattatatccagtaacacatagactgtgcgcataggcctgctttgtctcctctatcctgggcttttgttttgctttttagttttgcttttagtttttctgtcccttttatttaacgcaccgactagacacacaaagcagttgaatttttatatatatatctgtatattgcacaatta

SEQ ID NO: 1090 - DNA, 4043 bp, Homo sapiens
ttggtgacatttagtccctcaagccaccagatgtgacagtgttgagaactacctggatttgtatatatacctgcgcttgttttaaagtgggctcagcacatagggttcccacgaagctccgaaactctaagtgtttgctgcaattttataaggacttcctgattggtttctcttctccccttccatttctgccttttgttcatttcatcctttcacttctttcccttcctccatcctcctccttcctagttcatcccttctcttccaggcagccgcggtgcccaaccacacttgtcggctccagtccccagaactctgcctgccctttgtcctcctgctgccagtaccagccccaccctgttttgagccctgaggaggccttgggctctgctgagtccgacctggcctgtctgtgaagagcaagagagcagcaaggtcttgctctcctaggtagccccctcttccctggtaagaaaaagcaaaaggcatttcccaccctgaacaacgagccttttcacccttctactctagagaagtggactggaggagctgggcccgatttggtagttgaggaaagcacagaggcctcctgtggcctgccagtcatcgagtggcccaacaggggctccatgccagccgaccttgacctcactcagaagtccagagtctagcgtagtgcagcagggcagtagcggtaccaatgcagaactcccaagacccgagctgggaccagtacctgggtccccagcccttcctctgctcccccttttccctcggagttcttcttgaatggcaatgttttgcttttgctcgatgcagacagggggccagaacaccacacatttcactgtctgtctggtccatagctgtggtgtaggggcttagaggcatgggcttgctgtgggtttttaattgatcagttttcatgtgggatcccatctttttaacctctgttcaggaagtccttatctagctgcatatcttcatcatattggtatatccttttctgtgtttacagagatgtctcttatatctaaatctgtccaactgagaagtaccttatcaaagtagcaaatgagacagcagtcttatgcttccagaaacacccacaggcatgtcccatgtgagctgctgccatgaactgtcaagtgtgtgttgtcttgtgtatttcagttattgtccctggcttccttactatggtgtaatcatgaaggagtgaaacatcatagaaactgtctagcacttccttgccagtctttagtgatcaggaaccatagttgacagttccaatcagtagcttaagaaaaaaccgtgtttgtctcttctggaatggttagaagtgagggagtttgccccgttctgtttgtagagtctcatagttggactttctagcatatatgtgtccatttccttatgctgtaaaagcaagtcctgcaaccaaactcccatcagcccaatccctgatccctgatcccttccacctgctctgctgatgacccccccagcttcacttctgactcttccccaggaagggaaggggggtcagaagagagggtgagtcctccagaactcttcctccaaggacagaaggctcctgcccccatagtggcctcgaactcctggcactaccaaaggacacttatccacgagagcgcagcatccgaccaggttgtcactgagaagatgtttattttggtcagttgggtttttatgtattatacttagtcaaatgtaatgtggcttctggaatcattgtccagagctgcttccccgtcacctgggcgtcatctggtcctggtaagaggagtgcgtggcccaccaggcccccctgtcacccatgacagttcattcagggccgatggggcagtcgtggttgggaacacagcatttcaagcgtcactttatttcattcgggccccacctgcagctccctcaaagaggcagttgcccagcctctttcccttccagtttattccagagctgccagtggggcctgaggctccttagggttttctctctatttccccctttcttcctcattccctcgtctttcccaaaggcatcacgagtcagtcgcctttcagcaggcagccttggcggtttatcgccctggcaggcaggggccctgcagctctcatgctgcccctgccttggggtcaggttgacaggaggttggagggaaagccttaagctgcaggattctcaccagctgtgtccggcccagttttggggtgtgacctcaatttcaattttgtctgtacttgaacattatgaagatgggggcctctttcagtgaatttgtgaacagcagaattgaccgacagctttccagtacccatggggctaggtcattaaggccacatccacagtctcccccacccttgttccagttgttagttactacctcctctcctgacaatactgtatgtcgtcgagctccccccaggtctacccctcccggccctgcctgctggtgggcttgtcatagccagtgggattgccggtcttgacagctcagtgagctggagatacttggtcacagccaggcgctagcacagctcccttctgttgatgctgtattcccatatcaaaagacacaggggacacccagaaacgccacatcccccaatccatcagtgccaaactagccaacggccccagcttctcagctcgctggatggcggaagctgctactcgtgagcgccagtgcgggtgcagacaatcttctgttgggtggcatcattccaggcccgaagcatgaacagtgcacctgggacagggagcagccccaaattgtcacctgcttctctgcccagcttttcattgctgtgacagtgatggcgaaagagggtaataaccagacacaaactgccaagttgggtggagaaaggagtttctttagctgacagaatctctgaattttaaatcacttagtaagcggctcaagcccaggagggagcagagggatacgagcggagtcccctgcgcgggaccatctggaattggtttagcccaagtggagcctgacagccagaactctgtgtcccccgtctaaccacagctccttttccagagcattccagtcaggctctctgggctgactgggccaggggaggttacaggtaccagttctttaagaagatctttgggcatatacatttttagcctgtgtcattgccccaaatggattcctgtttcaagttcacacctgcagattctaggacctgtgtcctagacttcagggagtcagctgtttctagagttcctaccatggagtgggtctggaggacctgcccggtgggggggcagagccctgctccctccgggtcttcctactcttctctctgctctgacgggatttgttgattctctccattttggtgtctttctcttttagatattgtatcaatctttagaaaaggcatagtctacttgttataaatcgttaggatactgcctcccccagggtctaaaattacatattagaggggaaaagctgaacactgaagtcagttctcaacaatttagaaggaaaacctagaaaacatttggcagaaaattacatttcgatgtttttgaatgaatacgagcaagcttttacaacagtgctgatctaaaaatacttagcacttggcctgagatgcctggtgagcattacaggcaaggggaatctggaggtagccgacctgaggacatggcttctgaacctgtcttttgggagtggtatggaaggtggagcgttcaccagtgacctggaaggcccagcaccaccctccttcccactcttctcatcttgacagagcctgccccagcgctgacgtgtcaggaaaacacccagggaactaggaaggcacttctgcctgaggggcagcctgccttgcccactcctgctctgctcgcctcggatcagctgagccttctgagctggcctctcactgcctccccaaggccccctgcctgccctgtcaggaggcagaaggaagcaggtgtgagggcagtgcaaggagggagcacaacccccagctcccgctccgggctccgac

SEQ ID NO: 1091 - DNA, 4047 bp, Homo sapiens
tgtctgctccagctctggcatggctaggaggggggagtcccttgaactactgggtgtagactggcctgaaccacaggagaggatggcccagggtgaggtggcatggtccattctcaagggacgtcctccaacgggtggcgctagaggccatggaggcagtaggacaaggtgcaggcaggctggcctggggtcaggccgggcagagcacagcggggtgagagggattcctaatcactcagagcagtctgtgacttagtggacaggggagggggcaaagggggaggagaagaaaatgttcttccagttactttccaattctcctttagggacagcttagaattatttgcactattgagtcttcatgttcccacttcaaaacaaacagatgctctgagagcaaactggcttgaattggtgacatttagtccctcaagccaccagatgtgacagtgttgagaactacctggatttgtatatatacctgcgcttgttttaaagtgggctcagcacatagggttcccacgaagctccgaaactctaagtgtttgctgcaattttataaggacttcctgattggtttctcttctccccttccatttctgccttttgttcatttcatcctttcacttctttcccttcctccatcctcctccttcctagttcatcccttctcttccaggcagccgcggtgcccaaccacacttgtcggctccagtccccagaactctgcctgccctttgtcctcctgctgccagtaccagccccaccctgttttgagccctgaggaggccttgggctctgctgagtccgacctggcctgtctgtgaagagcaagagagcagcaaggtcttgctctcctaggtagccccctcttccctggtaagaaaaagcaaaaggcatttcccaccctgaacaacgagccttttcacccttctactctagagaagtggactggaggagctgggcccgatttggtagttgaggaaagcacagaggcctcctgtggcctgccagtcatcgagtggcccaacaggggctccatgccagccgaccttgacctcactcagaagtccagagtctagcgtagtgcagcagggcagtagcggtaccaatgcagaactcccaagacccgagctgggaccagtacctgggtccccagcccttcctctgctcccccttttccctcggagttcttcttgaatggcaatgttttgcttttgctcgatgcagacagggggccagaacaccacacatttcactgtctgtctggtccatagctgtggtgtaggggcttagaggcatgggcttgctgtgggtttttaattgatcagttttcatgtgggatcccatctttttaacctctgttcaggaagtccttatctagctgcatatcttcatcatattggtatatccttttctgtgtttacagagatgtctcttatatctaaatctgtccaactgagaagtaccttatcaaagtagcaaatgagacagcagtcttatgcttccagaaacacccacaggcatgtcccatgtgagctgctgccatgaactgtcaagtgtgtgttgtcttgtgtatttcagttattgtccctggcttccttactatggtgtaatcatgaaggagtgaaacatcatagaaactgtctagcacttccttgccagtctttagtgatcaggaaccatagttgacagttccaatcagtagcttaagaaaaaaccgtgtttgtctcttctggaatggttagaagtgagggagtttgccccgttctgtttgtagagtctcatagttggactttctagcatatatgtgtccatttccttatgctgtaaaagcaagtcctgcaaccaaactcccatcagcccaatccctgatccctgatcccttccacctgctctgctgatgacccccccagcttcacttctgactcttccccaggaagggaaggggggtcagaagagagggtgagtcctccagaactcttcctccaaggacagaaggctcctgcccccatagtggcctcgaactcctggcactaccaaaggacacttatccacgagagcgcagcatccgaccaggttgtcactgagaagatgtttattttggtcagttgggtttttatgtattatacttagtcaaatgtaatgtggcttctggaatcattgtccagagctgcttccccgtcacctgggcgtcatctggtcctggtaagaggagtgcgtggcccaccaggcccccctgtcacccatgacagttcattcagggccgatggggcagtcgtggttgggaacacagcatttcaagcgtcactttatttcattcgggccccacctgcagctccctcaaagaggcagttgcccagcctctttcccttccagtttattccagagctgccagtggggcctgaggctccttagggttttctctctatttccccctttcttcctcattccctcgtctttcccaaaggcatcacgagtcagtcgcctttcagcaggcagccttggcggtttatcgccctggcaggcaggggccctgcagctctcatgctgcccctgccttggggtcaggttgacaggaggttggagggaaagccttaagctgcaggattctcaccagctgtgtccggcccagttttggggtgtgacctcaatttcaattttgtctgtacttgaacattatgaagatgggggcctctttcagtgaatttgtgaacagcagaattgaccgacagctttccagtacccatggggctaggtcattaaggccacatccacagtctcccccacccttgttccagttgttagttactacctcctctcctgacaatactgtatgtcgtcgagctccccccaggtctacccctcccggccctgcctgctggtgggcttgtcatagccagtgggattgccggtcttgacagctcagtgagctggagatacttggtcacagccaggcgctagcacagctcccttctgttgatgctgtattcccatatcaaaagacacaggggacacccagaaacgccacatcccccaatccatcagtgccaaactagccaacggccccagcttctcagctcgctggatggcggaagctgctactcgtgagcgccagtgcgggtgcagacaatcttctgttgggtggcatcattccaggcccgaagcatgaacagtgcacctgggacagggagcagccccaaattgtcacctgcttctctgcccagcttttcattgctgtgacagtgatggcgaaagagggtaataaccagacacaaactgccaagttgggtggagaaaggagtttctttagctgacagaatctctgaattttaaatcacttagtaagcggctcaagcccaggagggagcagagggatacgagcggagtcccctgcgcgggaccatctggaattggtttagcccaagtggagcctgacagccagaactctgtgtcccccgtctaaccacagctccttttccagagcattccagtcaggctctctgggctgactgggccaggggaggttacaggtaccagttctttaagaagatctttgggcatatacatttttagcctgtgtcattgccccaaatggattcctgtttcaagttcacacctgcagattctaggacctgtgtcctagacttcagggagtcagctgtttctagagttcctaccatggagtgggtctggaggacctgcccggtgggggggcagagccctgctccctccgggtcttcctactcttctctctgctctgacgggatttgttgattctctccattttggtgtctttctcttttagatattgtatcaatctttagaaaaggcatagtctacttgttataaatcgttaggatactgcctcccccagggtctaaaattacatattagaggggaaaagctgaacactgaagtcagttctcaacaatttagaaggaaaacctagaaaacatttggcagaaaattacatttcgatgtttttgaatgaatacgagcaagcttttacaacagtgctgatctaaaaatacttagcacttggcc

SEQ ID NO: 1092 - DNA, 4046 bp, Homo sapiens
acctcccccactcccaaccacgttgggacagggaggtgtgaggcaggagagacagttggattctttagagaagatggatatgaccagtggctatggcctgtgcgatcccacccgtggtggctcaagtctggccccacaccagccccaatccaaaactggcaaggacgcttcacaggacaggaaagtggcacctgtctgctccagctctggcatggctaggaggggggagtcccttgaactactgggtgtagactggcctgaaccacaggagaggatggcccagggtgaggtggcatggtccattctcaagggacgtcctccaacgggtggcgctagaggccatggaggcagtaggacaaggtgcaggcaggctggcctggggtcaggccgggcagagcacagcggggtgagagggattcctaatcactcagagcagtctgtgacttagtggacaggggagggggcaaagggggaggagaagaaaatgttcttccagttactttccaattctcctttagggacagcttagaattatttgcactattgagtcttcatgttcccacttcaaaacaaacagatgctctgagagcaaactggcttgaattggtgacatttagtccctcaagccaccagatgtgacagtgttgagaactacctggatttgtatatatacctgcgcttgttttaaagtgggctcagcacatagggttcccacgaagctccgaaactctaagtgtttgctgcaattttataaggacttcctgattggtttctcttctccccttccatttctgccttttgttcatttcatcctttcacttctttcccttcctccatcctcctccttcctagttcatcccttctcttccaggcagccgcggtgcccaaccacacttgtcggctccagtccccagaactctgcctgccctttgtcctcctgctgccagtaccagccccaccctgttttgagccctgaggaggccttgggctctgctgagtccgacctggcctgtctgtgaagagcaagagagcagcaaggtcttgctctcctaggtagccccctcttccctggtaagaaaaagcaaaaggcatttcccaccctgaacaacgagccttttcacccttctactctagagaagtggactggaggagctgggcccgatttggtagttgaggaaagcacagaggcctcctgtggcctgccagtcatcgagtggcccaacaggggctccatgccagccgaccttgacctcactcagaagtccagagtctagcgtagtgcagcagggcagtagcggtaccaatgcagaactcccaagacccgagctgggaccagtacctgggtccccagcccttcctctgctcccccttttccctcggagttcttcttgaatggcaatgttttgcttttgctcgatgcagacagggggccagaacaccacacatttcactgtctgtctggtccatagctgtggtgtaggggcttagaggcatgggcttgctgtgggtttttaattgatcagttttcatgtgggatcccatctttttaacctctgttcaggaagtccttatctagctgcatatcttcatcatattggtatatccttttctgtgtttacagagatgtctcttatatctaaatctgtccaactgagaagtaccttatcaaagtagcaaatgagacagcagtcttatgcttccagaaacacccacaggcatgtcccatgtgagctgctgccatgaactgtcaagtgtgtgttgtcttgtgtatttcagttattgtccctggcttccttactatggtgtaatcatgaaggagtgaaacatcatagaaactgtctagcacttccttgccagtctttagtgatcaggaaccatagttgacagttccaatcagtagcttaagaaaaaaccgtgtttgtctcttctggaatggttagaagtgagggagtttgccccgttctgtttgtagagtctcatagttggactttctagcatatatgtgtccatttccttatgctgtaaaagcaagtcctgcaaccaaactcccatcagcccaatccctgatccctgatcccttccacctgctctgctgatgacccccccagcttcacttctgactcttccccaggaagggaaggggggtcagaagagagggtgagtcctccagaactcttcctccaaggacagaaggctcctgcccccatagtggcctcgaactcctggcactaccaaaggacacttatccacgagagcgcagcatccgaccaggttgtcactgagaagatgtttattttggtcagttgggtttttatgtattatacttagtcaaatgtaatgtggcttctggaatcattgtccagagctgcttccccgtcacctgggcgtcatctggtcctggtaagaggagtgcgtggcccaccaggcccccctgtcacccatgacagttcattcagggccgatggggcagtcgtggttgggaacacagcatttcaagcgtcactttatttcattcgggccccacctgcagctccctcaaagaggcagttgcccagcctctttcccttccagtttattccagagctgccagtggggcctgaggctccttagggttttctctctatttccccctttcttcctcattccctcgtctttcccaaaggcatcacgagtcagtcgcctttcagcaggcagccttggcggtttatcgccctggcaggcaggggccctgcagctctcatgctgcccctgccttggggtcaggttgacaggaggttggagggaaagccttaagctgcaggattctcaccagctgtgtccggcccagttttggggtgtgacctcaatttcaattttgtctgtacttgaacattatgaagatgggggcctctttcagtgaatttgtgaacagcagaattgaccgacagctttccagtacccatggggctaggtcattaaggccacatccacagtctcccccacccttgttccagttgttagttactacctcctctcctgacaatactgtatgtcgtcgagctccccccaggtctacccctcccggccctgcctgctggtgggcttgtcatagccagtgggattgccggtcttgacagctcagtgagctggagatacttggtcacagccaggcgctagcacagctcccttctgttgatgctgtattcccatatcaaaagacacaggggacacccagaaacgccacatcccccaatccatcagtgccaaactagccaacggccccagcttctcagctcgctggatggcggaagctgctactcgtgagcgccagtgcgggtgcagacaatcttctgttgggtggcatcattccaggcccgaagcatgaacagtgcacctgggacagggagcagccccaaattgtcacctgcttctctgcccagcttttcattgctgtgacagtgatggcgaaagagggtaataaccagacacaaactgccaagttgggtggagaaaggagtttctttagctgacagaatctctgaattttaaatcacttagtaagcggctcaagcccaggagggagcagagggatacgagcggagtcccctgcgcgggaccatctggaattggtttagcccaagtggagcctgacagccagaactctgtgtcccccgtctaaccacagctccttttccagagcattccagtcaggctctctgggctgactgggccaggggaggttacaggtaccagttctttaagaagatctttgggcatatacatttttagcctgtgtcattgccccaaatggattcctgtttcaagttcacacctgcagattctaggacctgtgtcctagacttcagggagtcagctgtttctagagttcctaccatggagtgggtctggaggacctgcccggtgggggggcagagccctgctccctccgggtcttcctactcttctctctgctctgacgggatttgttgattctctccattttggtgtctttctcttttagatattgtatcaatctttagaaaaggcatagtctacttgttataaat

SEQ ID NO: 1093 - DNA, 4042 bp, Homo sapiens
ggtcgttagagacagagcgacagagcagttgagaggacactcccgttttcggtgccatcagtgccccgtctacagctcccccagctccccccacctcccccactcccaaccacgttgggacagggaggtgtgaggcaggagagacagttggattctttagagaagatggatatgaccagtggctatggcctgtgcgatcccacccgtggtggctcaagtctggccccacaccagccccaatccaaaactggcaaggacgcttcacaggacaggaaagtggcacctgtctgctccagctctggcatggctaggaggggggagtcccttgaactactgggtgtagactggcctgaaccacaggagaggatggcccagggtgaggtggcatggtccattctcaagggacgtcctccaacgggtggcgctagaggccatggaggcagtaggacaaggtgcaggcaggctggcctggggtcaggccgggcagagcacagcggggtgagagggattcctaatcactcagagcagtctgtgacttagtggacaggggagggggcaaagggggaggagaagaaaatgttcttccagttactttccaattctcctttagggacagcttagaattatttgcactattgagtcttcatgttcccacttcaaaacaaacagatgctctgagagcaaactggcttgaattggtgacatttagtccctcaagccaccagatgtgacagtgttgagaactacctggatttgtatatatacctgcgcttgttttaaagtgggctcagcacatagggttcccacgaagctccgaaactctaagtgtttgctgcaattttataaggacttcctgattggtttctcttctccccttccatttctgccttttgttcatttcatcctttcacttctttcccttcctccatcctcctccttcctagttcatcccttctcttccaggcagccgcggtgcccaaccacacttgtcggctccagtccccagaactctgcctgccctttgtcctcctgctgccagtaccagccccaccctgttttgagccctgaggaggccttgggctctgctgagtccgacctggcctgtctgtgaagagcaagagagcagcaaggtcttgctctcctaggtagccccctcttccctggtaagaaaaagcaaaaggcatttcccaccctgaacaacgagccttttcacccttctactctagagaagtggactggaggagctgggcccgatttggtagttgaggaaagcacagaggcctcctgtggcctgccagtcatcgagtggcccaacaggggctccatgccagccgaccttgacctcactcagaagtccagagtctagcgtagtgcagcagggcagtagcggtaccaatgcagaactcccaagacccgagctgggaccagtacctgggtccccagcccttcctctgctcccccttttccctcggagttcttcttgaatggcaatgttttgcttttgctcgatgcagacagggggccagaacaccacacatttcactgtctgtctggtccatagctgtggtgtaggggcttagaggcatgggcttgctgtgggtttttaattgatcagttttcatgtgggatcccatctttttaacctctgttcaggaagtccttatctagctgcatatcttcatcatattggtatatccttttctgtgtttacagagatgtctcttatatctaaatctgtccaactgagaagtaccttatcaaagtagcaaatgagacagcagtcttatgcttccagaaacacccacaggcatgtcccatgtgagctgctgccatgaactgtcaagtgtgtgttgtcttgtgtatttcagttattgtccctggcttccttactatggtgtaatcatgaaggagtgaaacatcatagaaactgtctagcacttccttgccagtctttagtgatcaggaaccatagttgacagttccaatcagtagcttaagaaaaaaccgtgtttgtctcttctggaatggttagaagtgagggagtttgccccgttctgtttgtagagtctcatagttggactttctagcatatatgtgtccatttccttatgctgtaaaagcaagtcctgcaaccaaactcccatcagcccaatccctgatccctgatcccttccacctgctctgctgatgacccccccagcttcacttctgactcttccccaggaagggaaggggggtcagaagagagggtgagtcctccagaactcttcctccaaggacagaaggctcctgcccccatagtggcctcgaactcctggcactaccaaaggacacttatccacgagagcgcagcatccgaccaggttgtcactgagaagatgtttattttggtcagttgggtttttatgtattatacttagtcaaatgtaatgtggcttctggaatcattgtccagagctgcttccccgtcacctgggcgtcatctggtcctggtaagaggagtgcgtggcccaccaggcccccctgtcacccatgacagttcattcagggccgatggggcagtcgtggttgggaacacagcatttcaagcgtcactttatttcattcgggccccacctgcagctccctcaaagaggcagttgcccagcctctttcccttccagtttattccagagctgccagtggggcctgaggctccttagggttttctctctatttccccctttcttcctcattccctcgtctttcccaaaggcatcacgagtcagtcgcctttcagcaggcagccttggcggtttatcgccctggcaggcaggggccctgcagctctcatgctgcccctgccttggggtcaggttgacaggaggttggagggaaagccttaagctgcaggattctcaccagctgtgtccggcccagttttggggtgtgacctcaatttcaattttgtctgtacttgaacattatgaagatgggggcctctttcagtgaatttgtgaacagcagaattgaccgacagctttccagtacccatggggctaggtcattaaggccacatccacagtctcccccacccttgttccagttgttagttactacctcctctcctgacaatactgtatgtcgtcgagctccccccaggtctacccctcccggccctgcctgctggtgggcttgtcatagccagtgggattgccggtcttgacagctcagtgagctggagatacttggtcacagccaggcgctagcacagctcccttctgttgatgctgtattcccatatcaaaagacacaggggacacccagaaacgccacatcccccaatccatcagtgccaaactagccaacggccccagcttctcagctcgctggatggcggaagctgctactcgtgagcgccagtgcgggtgcagacaatcttctgttgggtggcatcattccaggcccgaagcatgaacagtgcacctgggacagggagcagccccaaattgtcacctgcttctctgcccagcttttcattgctgtgacagtgatggcgaaagagggtaataaccagacacaaactgccaagttgggtggagaaaggagtttctttagctgacagaatctctgaattttaaatcacttagtaagcggctcaagcccaggagggagcagagggatacgagcggagtcccctgcgcgggaccatctggaattggtttagcccaagtggagcctgacagccagaactctgtgtcccccgtctaaccacagctccttttccagagcattccagtcaggctctctgggctgactgggccaggggaggttacaggtaccagttctttaagaagatctttgggcatatacatttttagcctgtgtcattgccccaaatggattcctgtttcaagttcacacctgcagattctaggacctgtgtcctagacttcagggagtcagctgtttctagagttcctaccatggagtgggtctggaggacctgcccggtgggggggcagagccctgctccctccgggtcttcctactcttctctctg

SEQ ID NO: 1094 - DNA, 4046 bp, Homo sapiens
gtcaggttgaagacctaaccagggccagaagtagctttgcacttttctaaactaggctccttcaacaaggcttgctgcagatactactgaccagacaagctgttgaccaggcacctcccctcccgcccaaacctttcccccatgtggtcgttagagacagagcgacagagcagttgagaggacactcccgttttcggtgccatcagtgccccgtctacagctcccccagctccccccacctcccccactcccaaccacgttgggacagggaggtgtgaggcaggagagacagttggattctttagagaagatggatatgaccagtggctatggcctgtgcgatcccacccgtggtggctcaagtctggccccacaccagccccaatccaaaactggcaaggacgcttcacaggacaggaaagtggcacctgtctgctccagctctggcatggctaggaggggggagtcccttgaactactgggtgtagactggcctgaaccacaggagaggatggcccagggtgaggtggcatggtccattctcaagggacgtcctccaacgggtggcgctagaggccatggaggcagtaggacaaggtgcaggcaggctggcctggggtcaggccgggcagagcacagcggggtgagagggattcctaatcactcagagcagtctgtgacttagtggacaggggagggggcaaagggggaggagaagaaaatgttcttccagttactttccaattctcctttagggacagcttagaattatttgcactattgagtcttcatgttcccacttcaaaacaaacagatgctctgagagcaaactggcttgaattggtgacatttagtccctcaagccaccagatgtgacagtgttgagaactacctggatttgtatatatacctgcgcttgttttaaagtgggctcagcacatagggttcccacgaagctccgaaactctaagtgtttgctgcaattttataaggacttcctgattggtttctcttctccccttccatttctgccttttgttcatttcatcctttcacttctttcccttcctccatcctcctccttcctagttcatcccttctcttccaggcagccgcggtgcccaaccacacttgtcggctccagtccccagaactctgcctgccctttgtcctcctgctgccagtaccagccccaccctgttttgagccctgaggaggccttgggctctgctgagtccgacctggcctgtctgtgaagagcaagagagcagcaaggtcttgctctcctaggtagccccctcttccctggtaagaaaaagcaaaaggcatttcccaccctgaacaacgagccttttcacccttctactctagagaagtggactggaggagctgggcccgatttggtagttgaggaaagcacagaggcctcctgtggcctgccagtcatcgagtggcccaacaggggctccatgccagccgaccttgacctcactcagaagtccagagtctagcgtagtgcagcagggcagtagcggtaccaatgcagaactcccaagacccgagctgggaccagtacctgggtccccagcccttcctctgctcccccttttccctcggagttcttcttgaatggcaatgttttgcttttgctcgatgcagacagggggccagaacaccacacatttcactgtctgtctggtccatagctgtggtgtaggggcttagaggcatgggcttgctgtgggtttttaattgatcagttttcatgtgggatcccatctttttaacctctgttcaggaagtccttatctagctgcatatcttcatcatattggtatatccttttctgtgtttacagagatgtctcttatatctaaatctgtccaactgagaagtaccttatcaaagtagcaaatgagacagcagtcttatgcttccagaaacacccacaggcatgtcccatgtgagctgctgccatgaactgtcaagtgtgtgttgtcttgtgtatttcagttattgtccctggcttccttactatggtgtaatcatgaaggagtgaaacatcatagaaactgtctagcacttccttgccagtctttagtgatcaggaaccatagttgacagttccaatcagtagcttaagaaaaaaccgtgtttgtctcttctggaatggttagaagtgagggagtttgccccgttctgtttgtagagtctcatagttggactttctagcatatatgtgtccatttccttatgctgtaaaagcaagtcctgcaaccaaactcccatcagcccaatccctgatccctgatcccttccacctgctctgctgatgacccccccagcttcacttctgactcttccccaggaagggaaggggggtcagaagagagggtgagtcctccagaactcttcctccaaggacagaaggctcctgcccccatagtggcctcgaactcctggcactaccaaaggacacttatccacgagagcgcagcatccgaccaggttgtcactgagaagatgtttattttggtcagttgggtttttatgtattatacttagtcaaatgtaatgtggcttctggaatcattgtccagagctgcttccccgtcacctgggcgtcatctggtcctggtaagaggagtgcgtggcccaccaggcccccctgtcacccatgacagttcattcagggccgatggggcagtcgtggttgggaacacagcatttcaagcgtcactttatttcattcgggccccacctgcagctccctcaaagaggcagttgcccagcctctttcccttccagtttattccagagctgccagtggggcctgaggctccttagggttttctctctatttccccctttcttcctcattccctcgtctttcccaaaggcatcacgagtcagtcgcctttcagcaggcagccttggcggtttatcgccctggcaggcaggggccctgcagctctcatgctgcccctgccttggggtcaggttgacaggaggttggagggaaagccttaagctgcaggattctcaccagctgtgtccggcccagttttggggtgtgacctcaatttcaattttgtctgtacttgaacattatgaagatgggggcctctttcagtgaatttgtgaacagcagaattgaccgacagctttccagtacccatggggctaggtcattaaggccacatccacagtctcccccacccttgttccagttgttagttactacctcctctcctgacaatactgtatgtcgtcgagctccccccaggtctacccctcccggccctgcctgctggtgggcttgtcatagccagtgggattgccggtcttgacagctcagtgagctggagatacttggtcacagccaggcgctagcacagctcccttctgttgatgctgtattcccatatcaaaagacacaggggacacccagaaacgccacatcccccaatccatcagtgccaaactagccaacggccccagcttctcagctcgctggatggcggaagctgctactcgtgagcgccagtgcgggtgcagacaatcttctgttgggtggcatcattccaggcccgaagcatgaacagtgcacctgggacagggagcagccccaaattgtcacctgcttctctgcccagcttttcattgctgtgacagtgatggcgaaagagggtaataaccagacacaaactgccaagttgggtggagaaaggagtttctttagctgacagaatctctgaattttaaatcacttagtaagcggctcaagcccaggagggagcagagggatacgagcggagtcccctgcgcgggaccatctggaattggtttagcccaagtggagcctgacagccagaactctgtgtcccccgtctaaccacagctccttttccagagcattccagtcaggctctctgggctgactgggccaggggaggttacaggtaccagttctttaagaagatctttgggcatatacatttttagcctgtgtcattgccccaaatggattcctgtttcaagttcac

SEQ ID NO: 1095 - DNA, 4049 bp, Homo sapiens
tctcttctccttatgggtagggctctgacaaagcttcccgattaactgaaataaaaaatatttttttttctttcagtaaacttagagtttcgtggcttcagggtgggagtagttggagcattggggatgtttttcttaccgacaagcacagtcaggttgaagacctaaccagggccagaagtagctttgcacttttctaaactaggctccttcaacaaggcttgctgcagatactactgaccagacaagctgttgaccaggcacctcccctcccgcccaaacctttcccccatgtggtcgttagagacagagcgacagagcagttgagaggacactcccgttttcggtgccatcagtgccccgtctacagctcccccagctccccccacctcccccactcccaaccacgttgggacagggaggtgtgaggcaggagagacagttggattctttagagaagatggatatgaccagtggctatggcctgtgcgatcccacccgtggtggctcaagtctggccccacaccagccccaatccaaaactggcaaggacgcttcacaggacaggaaagtggcacctgtctgctccagctctggcatggctaggaggggggagtcccttgaactactgggtgtagactggcctgaaccacaggagaggatggcccagggtgaggtggcatggtccattctcaagggacgtcctccaacgggtggcgctagaggccatggaggcagtaggacaaggtgcaggcaggctggcctggggtcaggccgggcagagcacagcggggtgagagggattcctaatcactcagagcagtctgtgacttagtggacaggggagggggcaaagggggaggagaagaaaatgttcttccagttactttccaattctcctttagggacagcttagaattatttgcactattgagtcttcatgttcccacttcaaaacaaacagatgctctgagagcaaactggcttgaattggtgacatttagtccctcaagccaccagatgtgacagtgttgagaactacctggatttgtatatatacctgcgcttgttttaaagtgggctcagcacatagggttcccacgaagctccgaaactctaagtgtttgctgcaattttataaggacttcctgattggtttctcttctccccttccatttctgccttttgttcatttcatcctttcacttctttcccttcctccatcctcctccttcctagttcatcccttctcttccaggcagccgcggtgcccaaccacacttgtcggctccagtccccagaactctgcctgccctttgtcctcctgctgccagtaccagccccaccctgttttgagccctgaggaggccttgggctctgctgagtccgacctggcctgtctgtgaagagcaagagagcagcaaggtcttgctctcctaggtagccccctcttccctggtaagaaaaagcaaaaggcatttcccaccctgaacaacgagccttttcacccttctactctagagaagtggactggaggagctgggcccgatttggtagttgaggaaagcacagaggcctcctgtggcctgccagtcatcgagtggcccaacaggggctccatgccagccgaccttgacctcactcagaagtccagagtctagcgtagtgcagcagggcagtagcggtaccaatgcagaactcccaagacccgagctgggaccagtacctgggtccccagcccttcctctgctcccccttttccctcggagttcttcttgaatggcaatgttttgcttttgctcgatgcagacagggggccagaacaccacacatttcactgtctgtctggtccatagctgtggtgtaggggcttagaggcatgggcttgctgtgggtttttaattgatcagttttcatgtgggatcccatctttttaacctctgttcaggaagtccttatctagctgcatatcttcatcatattggtatatccttttctgtgtttacagagatgtctcttatatctaaatctgtccaactgagaagtaccttatcaaagtagcaaatgagacagcagtcttatgcttccagaaacacccacaggcatgtcccatgtgagctgctgccatgaactgtcaagtgtgtgttgtcttgtgtatttcagttattgtccctggcttccttactatggtgtaatcatgaaggagtgaaacatcatagaaactgtctagcacttccttgccagtctttagtgatcaggaaccatagttgacagttccaatcagtagcttaagaaaaaaccgtgtttgtctcttctggaatggttagaagtgagggagtttgccccgttctgtttgtagagtctcatagttggactttctagcatatatgtgtccatttccttatgctgtaaaagcaagtcctgcaaccaaactcccatcagcccaatccctgatccctgatcccttccacctgctctgctgatgacccccccagcttcacttctgactcttccccaggaagggaaggggggtcagaagagagggtgagtcctccagaactcttcctccaaggacagaaggctcctgcccccatagtggcctcgaactcctggcactaccaaaggacacttatccacgagagcgcagcatccgaccaggttgtcactgagaagatgtttattttggtcagttgggtttttatgtattatacttagtcaaatgtaatgtggcttctggaatcattgtccagagctgcttccccgtcacctgggcgtcatctggtcctggtaagaggagtgcgtggcccaccaggcccccctgtcacccatgacagttcattcagggccgatggggcagtcgtggttgggaacacagcatttcaagcgtcactttatttcattcgggccccacctgcagctccctcaaagaggcagttgcccagcctctttcccttccagtttattccagagctgccagtggggcctgaggctccttagggttttctctctatttccccctttcttcctcattccctcgtctttcccaaaggcatcacgagtcagtcgcctttcagcaggcagccttggcggtttatcgccctggcaggcaggggccctgcagctctcatgctgcccctgccttggggtcaggttgacaggaggttggagggaaagccttaagctgcaggattctcaccagctgtgtccggcccagttttggggtgtgacctcaatttcaattttgtctgtacttgaacattatgaagatgggggcctctttcagtgaatttgtgaacagcagaattgaccgacagctttccagtacccatggggctaggtcattaaggccacatccacagtctcccccacccttgttccagttgttagttactacctcctctcctgacaatactgtatgtcgtcgagctccccccaggtctacccctcccggccctgcctgctggtgggcttgtcatagccagtgggattgccggtcttgacagctcagtgagctggagatacttggtcacagccaggcgctagcacagctcccttctgttgatgctgtattcccatatcaaaagacacaggggacacccagaaacgccacatcccccaatccatcagtgccaaactagccaacggccccagcttctcagctcgctggatggcggaagctgctactcgtgagcgccagtgcgggtgcagacaatcttctgttgggtggcatcattccaggcccgaagcatgaacagtgcacctgggacagggagcagccccaaattgtcacctgcttctctgcccagcttttcattgctgtgacagtgatggcgaaagagggtaataaccagacacaaactgccaagttgggtggagaaaggagtttctttagctgacagaatctctgaattttaaatcacttagtaagcggctcaagcccaggagggagcagagggatacgagcggagtcccctgcgcgggaccatctggaattggtttagcccaagtggagcctgacagccagaactctgtgtcccccgtctaaccac

SEQ ID NO: 1096 - DNA, 4086 bp, Homo sapiens
aaggccaaacagagaggagcctgtggacagccggacgcccgtgaccgagagagttagctgactttacacggagcggattgcaaagcaaaccaacaagaataaaggcagctgttgtctcttctccttatgggtagggctctgacaaagcttcccgattaactgaaataaaaaatatttttttttctttcagtaaacttagagtttcgtggcttcagggtgggagtagttggagcattggggatgtttttcttaccgacaagcacagtcaggttgaagacctaaccagggccagaagtagctttgcacttttctaaactaggctccttcaacaaggcttgctgcagatactactgaccagacaagctgttgaccaggcacctcccctcccgcccaaacctttcccccatgtggtcgttagagacagagcgacagagcagttgagaggacactcccgttttcggtgccatcagtgccccgtctacagctcccccagctccccccacctcccccactcccaaccacgttgggacagggaggtgtgaggcaggagagacagttggattctttagagaagatggatatgaccagtggctatggcctgtgcgatcccacccgtggtggctcaagtctggccccacaccagccccaatccaaaactggcaaggacgcttcacaggacaggaaagtggcacctgtctgctccagctctggcatggctaggaggggggagtcccttgaactactgggtgtagactggcctgaaccacaggagaggatggcccagggtgaggtggcatggtccattctcaagggacgtcctccaacgggtggcgctagaggccatggaggcagtaggacaaggtgcaggcaggctggcctggggtcaggccgggcagagcacagcggggtgagagggattcctaatcactcagagcagtctgtgacttagtggacaggggagggggcaaagggggaggagaagaaaatgttcttccagttactttccaattctcctttagggacagcttagaattatttgcactattgagtcttcatgttcccacttcaaaacaaacagatgctctgagagcaaactggcttgaattggtgacatttagtccctcaagccaccagatgtgacagtgttgagaactacctggatttgtatatatacctgcgcttgttttaaagtgggctcagcacatagggttcccacgaagctccgaaactctaagtgtttgctgcaattttataaggacttcctgattggtttctcttctccccttccatttctgccttttgttcatttcatcctttcacttctttcccttcctccatcctcctccttcctagttcatcccttctcttccaggcagccgcggtgcccaaccacacttgtcggctccagtccccagaactctgcctgccctttgtcctcctgctgccagtaccagccccaccctgttttgagccctgaggaggccttgggctctgctgagtccgacctggcctgtctgtgaagagcaagagagcagcaaggtcttgctctcctaggtagccccctcttccctggtaagaaaaagcaaaaggcatttcccaccctgaacaacgagccttttcacccttctactctagagaagtggactggaggagctgggcccgatttggtagttgaggaaagcacagaggcctcctgtggcctgccagtcatcgagtggcccaacaggggctccatgccagccgaccttgacctcactcagaagtccagagtctagcgtagtgcagcagggcagtagcggtaccaatgcagaactcccaagacccgagctgggaccagtacctgggtccccagcccttcctctgctcccccttttccctcggagttcttcttgaatggcaatgttttgcttttgctcgatgcagacagggggccagaacaccacacatttcactgtctgtctggtccatagctgtggtgtaggggcttagaggcatgggcttgctgtgggtttttaattgatcagttttcatgtgggatcccatctttttaacctctgttcaggaagtccttatctagctgcatatcttcatcatattggtatatccttttctgtgtttacagagatgtctcttatatctaaatctgtccaactgagaagtaccttatcaaagtagcaaatgagacagcagtcttatgcttccagaaacacccacaggcatgtcccatgtgagctgctgccatgaactgtcaagtgtgtgttgtcttgtgtatttcagttattgtccctggcttccttactatggtgtaatcatgaaggagtgaaacatcatagaaactgtctagcacttccttgccagtctttagtgatcaggaaccatagttgacagttccaatcagtagcttaagaaaaaaccgtgtttgtctcttctggaatggttagaagtgagggagtttgccccgttctgtttgtagagtctcatagttggactttctagcatatatgtgtccatttccttatgctgtaaaagcaagtcctgcaaccaaactcccatcagcccaatccctgatccctgatcccttccacctgctctgctgatgacccccccagcttcacttctgactcttccccaggaagggaaggggggtcagaagagagggtgagtcctccagaactcttcctccaaggacagaaggctcctgcccccatagtggcctcgaactcctggcactaccaaaggacacttatccacgagagcgcagcatccgaccaggttgtcactgagaagatgtttattttggtcagttgggtttttatgtattatacttagtcaaatgtaatgtggcttctggaatcattgtccagagctgcttccccgtcacctgggcgtcatctggtcctggtaagaggagtgcgtggcccaccaggcccccctgtcacccatgacagttcattcagggccgatggggcagtcgtggttgggaacacagcatttcaagcgtcactttatttcattcgggccccacctgcagctccctcaaagaggcagttgcccagcctctttcccttccagtttattccagagctgccagtggggcctgaggctccttagggttttctctctatttccccctttcttcctcattccctcgtctttcccaaaggcatcacgagtcagtcgcctttcagcaggcagccttggcggtttatcgccctggcaggcaggggccctgcagctctcatgctgcccctgccttggggtcaggttgacaggaggttggagggaaagccttaagctgcaggattctcaccagctgtgtccggcccagttttggggtgtgacctcaatttcaattttgtctgtacttgaacattatgaagatgggggcctctttcagtgaatttgtgaacagcagaattgaccgacagctttccagtacccatggggctaggtcattaaggccacatccacagtctcccccacccttgttccagttgttagttactacctcctctcctgacaatactgtatgtcgtcgagctccccccaggtctacccctcccggccctgcctgctggtgggcttgtcatagccagtgggattgccggtcttgacagctcagtgagctggagatacttggtcacagccaggcgctagcacagctcccttctgttgatgctgtattcccatatcaaaagacacaggggacacccagaaacgccacatcccccaatccatcagtgccaaactagccaacggccccagcttctcagctcgctggatggcggaagctgctactcgtgagcgccagtgcgggtgcagacaatcttctgttgggtggcatcattccaggcccgaagcatgaacagtgcacctgggacagggagcagccccaaattgtcacctgcttctctgcccagcttttcattgctgtgacagtgatggcgaaagagggtaataaccagacacaaactgccaagttgggtggagaaaggagtttctttagctgacagaatctctgaattttaaatcacttagtaagcggctcaagcccaggagggagcagagggatacgagcggagtccc

SEQ ID NO: 1097 - DNA, 4047 bp, Homo sapiens
ccacggccgcagaaaagtacaaacaccgaggggagggagagcgcaaagacattgtttcatcctccatgccaaggccaaacagagaggagcctgtggacagccggacgcccgtgaccgagagagttagctgactttacacggagcggattgcaaagcaaaccaacaagaataaaggcagctgttgtctcttctccttatgggtagggctctgacaaagcttcccgattaactgaaataaaaaatatttttttttctttcagtaaacttagagtttcgtggcttcagggtgggagtagttggagcattggggatgtttttcttaccgacaagcacagtcaggttgaagacctaaccagggccagaagtagctttgcacttttctaaactaggctccttcaacaaggcttgctgcagatactactgaccagacaagctgttgaccaggcacctcccctcccgcccaaacctttcccccatgtggtcgttagagacagagcgacagagcagttgagaggacactcccgttttcggtgccatcagtgccccgtctacagctcccccagctccccccacctcccccactcccaaccacgttgggacagggaggtgtgaggcaggagagacagttggattctttagagaagatggatatgaccagtggctatggcctgtgcgatcccacccgtggtggctcaagtctggccccacaccagccccaatccaaaactggcaaggacgcttcacaggacaggaaagtggcacctgtctgctccagctctggcatggctaggaggggggagtcccttgaactactgggtgtagactggcctgaaccacaggagaggatggcccagggtgaggtggcatggtccattctcaagggacgtcctccaacgggtggcgctagaggccatggaggcagtaggacaaggtgcaggcaggctggcctggggtcaggccgggcagagcacagcggggtgagagggattcctaatcactcagagcagtctgtgacttagtggacaggggagggggcaaagggggaggagaagaaaatgttcttccagttactttccaattctcctttagggacagcttagaattatttgcactattgagtcttcatgttcccacttcaaaacaaacagatgctctgagagcaaactggcttgaattggtgacatttagtccctcaagccaccagatgtgacagtgttgagaactacctggatttgtatatatacctgcgcttgttttaaagtgggctcagcacatagggttcccacgaagctccgaaactctaagtgtttgctgcaattttataaggacttcctgattggtttctcttctccccttccatttctgccttttgttcatttcatcctttcacttctttcccttcctccatcctcctccttcctagttcatcccttctcttccaggcagccgcggtgcccaaccacacttgtcggctccagtccccagaactctgcctgccctttgtcctcctgctgccagtaccagccccaccctgttttgagccctgaggaggccttgggctctgctgagtccgacctggcctgtctgtgaagagcaagagagcagcaaggtcttgctctcctaggtagccccctcttccctggtaagaaaaagcaaaaggcatttcccaccctgaacaacgagccttttcacccttctactctagagaagtggactggaggagctgggcccgatttggtagttgaggaaagcacagaggcctcctgtggcctgccagtcatcgagtggcccaacaggggctccatgccagccgaccttgacctcactcagaagtccagagtctagcgtagtgcagcagggcagtagcggtaccaatgcagaactcccaagacccgagctgggaccagtacctgggtccccagcccttcctctgctcccccttttccctcggagttcttcttgaatggcaatgttttgcttttgctcgatgcagacagggggccagaacaccacacatttcactgtctgtctggtccatagctgtggtgtaggggcttagaggcatgggcttgctgtgggtttttaattgatcagttttcatgtgggatcccatctttttaacctctgttcaggaagtccttatctagctgcatatcttcatcatattggtatatccttttctgtgtttacagagatgtctcttatatctaaatctgtccaactgagaagtaccttatcaaagtagcaaatgagacagcagtcttatgcttccagaaacacccacaggcatgtcccatgtgagctgctgccatgaactgtcaagtgtgtgttgtcttgtgtatttcagttattgtccctggcttccttactatggtgtaatcatgaaggagtgaaacatcatagaaactgtctagcacttccttgccagtctttagtgatcaggaaccatagttgacagttccaatcagtagcttaagaaaaaaccgtgtttgtctcttctggaatggttagaagtgagggagtttgccccgttctgtttgtagagtctcatagttggactttctagcatatatgtgtccatttccttatgctgtaaaagcaagtcctgcaaccaaactcccatcagcccaatccctgatccctgatcccttccacctgctctgctgatgacccccccagcttcacttctgactcttccccaggaagggaaggggggtcagaagagagggtgagtcctccagaactcttcctccaaggacagaaggctcctgcccccatagtggcctcgaactcctggcactaccaaaggacacttatccacgagagcgcagcatccgaccaggttgtcactgagaagatgtttattttggtcagttgggtttttatgtattatacttagtcaaatgtaatgtggcttctggaatcattgtccagagctgcttccccgtcacctgggcgtcatctggtcctggtaagaggagtgcgtggcccaccaggcccccctgtcacccatgacagttcattcagggccgatggggcagtcgtggttgggaacacagcatttcaagcgtcactttatttcattcgggccccacctgcagctccctcaaagaggcagttgcccagcctctttcccttccagtttattccagagctgccagtggggcctgaggctccttagggttttctctctatttccccctttcttcctcattccctcgtctttcccaaaggcatcacgagtcagtcgcctttcagcaggcagccttggcggtttatcgccctggcaggcaggggccctgcagctctcatgctgcccctgccttggggtcaggttgacaggaggttggagggaaagccttaagctgcaggattctcaccagctgtgtccggcccagttttggggtgtgacctcaatttcaattttgtctgtacttgaacattatgaagatgggggcctctttcagtgaatttgtgaacagcagaattgaccgacagctttccagtacccatggggctaggtcattaaggccacatccacagtctcccccacccttgttccagttgttagttactacctcctctcctgacaatactgtatgtcgtcgagctccccccaggtctacccctcccggccctgcctgctggtgggcttgtcatagccagtgggattgccggtcttgacagctcagtgagctggagatacttggtcacagccaggcgctagcacagctcccttctgttgatgctgtattcccatatcaaaagacacaggggacacccagaaacgccacatcccccaatccatcagtgccaaactagccaacggccccagcttctcagctcgctggatggcggaagctgctactcgtgagcgccagtgcgggtgcagacaatcttctgttgggtggcatcattccaggcccgaagcatgaacagtgcacctgggacagggagcagccccaaattgtcacctgcttctctgcccagcttttcattgctgtgacagtgatggcgaaagagggtaataaccagacacaaactgcc

SEQ ID NO: 1098 - DNA, 4047 bp, Homo sapiens
agccggggagtgtggtggcagccgctgccgccgaggccaaaaagaaagccgtgaaggagtcttctatccgatctgtgcaggagaccgtactccccatcaagaagcgcaagacccgggagacggtcagcatcgaggtcaaggaagtggtgaagcccctgctggtgtccaccctcggtgagaagagcgggaaaggactgaagacctgtaagagccctgggcggaaaagcaaggagagcagccccaaggggcgcagcagcagcgcctcctcaccccccaagaaggagcaccaccaccatcaccaccactcagagtccccaaaggcccccgtgccactgctcccacccctgcccccacctccacctgagcccgagagctccgaggaccccaccagcccccctgagccccaggacttgagcagcagcgtctgcaaagaggagaagatgcccagaggaggctcactggagagcgacggctgccccaaggagccagctaagactcagcccgcggttgccaccgccgccacggccgcagaaaagtacaaacaccgaggggagggagagcgcaaagacattgtttcatcctccatgccaaggccaaacagagaggagcctgtggacagccggacgcccgtgaccgagagagttagctgactttacacggagcggattgcaaagcaaaccaacaagaataaaggcagctgttgtctcttctccttatgggtagggctctgacaaagcttcccgattaactgaaataaaaaatatttttttttctttcagtaaacttagagtttcgtggcttcagggtgggagtagttggagcattggggatgtttttcttaccgacaagcacagtcaggttgaagacctaaccagggccagaagtagctttgcacttttctaaactaggctccttcaacaaggcttgctgcagatactactgaccagacaagctgttgaccaggcacctcccctcccgcccaaacctttcccccatgtggtcgttagagacagagcgacagagcagttgagaggacactcccgttttcggtgccatcagtgccccgtctacagctcccccagctccccccacctcccccactcccaaccacgttgggacagggaggtgtgaggcaggagagacagttggattctttagagaagatggatatgaccagtggctatggcctgtgcgatcccacccgtggtggctcaagtctggccccacaccagccccaatccaaaactggcaaggacgcttcacaggacaggaaagtggcacctgtctgctccagctctggcatggctaggaggggggagtcccttgaactactgggtgtagactggcctgaaccacaggagaggatggcccagggtgaggtggcatggtccattctcaagggacgtcctccaacgggtggcgctagaggccatggaggcagtaggacaaggtgcaggcaggctggcctggggtcaggccgggcagagcacagcggggtgagagggattcctaatcactcagagcagtctgtgacttagtggacaggggagggggcaaagggggaggagaagaaaatgttcttccagttactttccaattctcctttagggacagcttagaattatttgcactattgagtcttcatgttcccacttcaaaacaaacagatgctctgagagcaaactggcttgaattggtgacatttagtccctcaagccaccagatgtgacagtgttgagaactacctggatttgtatatatacctgcgcttgttttaaagtgggctcagcacatagggttcccacgaagctccgaaactctaagtgtttgctgcaattttataaggacttcctgattggtttctcttctccccttccatttctgccttttgttcatttcatcctttcacttctttcccttcctccatcctcctccttcctagttcatcccttctcttccaggcagccgcggtgcccaaccacacttgtcggctccagtccccagaactctgcctgccctttgtcctcctgctgccagtaccagccccaccctgttttgagccctgaggaggccttgggctctgctgagtccgacctggcctgtctgtgaagagcaagagagcagcaaggtcttgctctcctaggtagccccctcttccctggtaagaaaaagcaaaaggcatttcccaccctgaacaacgagccttttcacccttctactctagagaagtggactggaggagctgggcccgatttggtagttgaggaaagcacagaggcctcctgtggcctgccagtcatcgagtggcccaacaggggctccatgccagccgaccttgacctcactcagaagtccagagtctagcgtagtgcagcagggcagtagcggtaccaatgcagaactcccaagacccgagctgggaccagtacctgggtccccagcccttcctctgctcccccttttccctcggagttcttcttgaatggcaatgttttgcttttgctcgatgcagacagggggccagaacaccacacatttcactgtctgtctggtccatagctgtggtgtaggggcttagaggcatgggcttgctgtgggtttttaattgatcagttttcatgtgggatcccatctttttaacctctgttcaggaagtccttatctagctgcatatcttcatcatattggtatatccttttctgtgtttacagagatgtctcttatatctaaatctgtccaactgagaagtaccttatcaaagtagcaaatgagacagcagtcttatgcttccagaaacacccacaggcatgtcccatgtgagctgctgccatgaactgtcaagtgtgtgttgtcttgtgtatttcagttattgtccctggcttccttactatggtgtaatcatgaaggagtgaaacatcatagaaactgtctagcacttccttgccagtctttagtgatcaggaaccatagttgacagttccaatcagtagcttaagaaaaaaccgtgtttgtctcttctggaatggttagaagtgagggagtttgccccgttctgtttgtagagtctcatagttggactttctagcatatatgtgtccatttccttatgctgtaaaagcaagtcctgcaaccaaactcccatcagcccaatccctgatccctgatcccttccacctgctctgctgatgacccccccagcttcacttctgactcttccccaggaagggaaggggggtcagaagagagggtgagtcctccagaactcttcctccaaggacagaaggctcctgcccccatagtggcctcgaactcctggcactaccaaaggacacttatccacgagagcgcagcatccgaccaggttgtcactgagaagatgtttattttggtcagttgggtttttatgtattatacttagtcaaatgtaatgtggcttctggaatcattgtccagagctgcttccccgtcacctgggcgtcatctggtcctggtaagaggagtgcgtggcccaccaggcccccctgtcacccatgacagttcattcagggccgatggggcagtcgtggttgggaacacagcatttcaagcgtcactttatttcattcgggccccacctgcagctccctcaaagaggcagttgcccagcctctttcccttccagtttattccagagctgccagtggggcctgaggctccttagggttttctctctatttccccctttcttcctcattccctcgtctttcccaaaggcatcacgagtcagtcgcctttcagcaggcagccttggcggtttatcgccctggcaggcaggggccctgcagctctcatgctgcccctgccttggggtcaggttgacaggaggttggagggaaagccttaagctgcaggattctcaccagctgtgtccggcccagttttggggtgtgacctcaatttcaattttgtctgtacttgaacattatgaagatgggggcctctttcagtgaatttgtgaacagcagaattgaccgacagctttccagtacccatggggctaggtcatta

SEQ ID NO: 1099 - DNA, 4045 bp, Homo sapiens
cggtggctcacgcctgtaatcccagcactttgggaggctgaggcgggtcgatcacctgaggtcaggagttcgagaccagcctgcccaacatggtgaaaccccgtctccactaaacatacaaaaattagcctggcgtggtagcacacgcctgtgatcccagctactccggaggctgaggcaggagaataacttgaacccggcaggcggaggttgcgatgagccgatattatgccatcggcaacagagcgagactccatctcaaaaaaaaaacaaaaaacaaaacaaggcgagctctgtgctgggacagattagggacccctctttacagcaagaaagactgctctgtgggttgtaggatgcctttgtgtatgcagtggctctaggtgactctggcagccacactctgggccctaaacttctggaggaagatacaggatagggaggaactcaggggtgagtcatggtggggacaagacattccctcactctaagaccttgtcactagattggaacatctcttgcctccctacacctgacctgatggttctggagagatacgtccttgcagcttctgagtcccagcactaagcagcctttggtaacttccctacatcatttgagttctggtttcctaaggatgcttgccagtgagtgccatggtgccctcattgcacagtctgtgcagtgtagacaagaggggaagtctcttggggtagaccagccgcaaggcggtgactagcactgatgtgaaccacatgggacaggggagttgtggggctgagaacacggagggtgggagtagtcatgctcttttccagaatgaactgctaacgaagggactcgcaggtggctgctgcttctttccaagctgcccctgttgttgcagaggctctggagtcctaggaggtttcacggtggcatactcgacagagtactagagcatcatggccagatagtgatgctggggtgtggggcctcacggtggccatttctgacgagaccccaccgggccaaagtgatgtgtagagaaggagctgcttcggtcaccagaaaagaacggggaagcctcccacactagaataggtagggtgctcttctccaccggcaggaaggggatgtatggctctgcctggaccacacctttttccttgctcttccctccgcatctgctgtggccgaggccattcctcatcagggaacatgtgttagaggctcacgccacctgggaccacttgtcttatcacccccaggaccctaggcggtagtttcctgtggcctgagttagctgatatttatatagtgccattgtgccttttctcctgtgatgctcacagtaaggatgcctagatggggttacctgttgtcaagataaggaaactgaagcacagaatgctgaggtcatttgctgggttcatgtttggaaagcggcaaaggatttcagtgcaggttggctggctccaaacctgtgtgtgctttccatgacactgtactgtgtgcctcattgagcctcattctagaaaaccaaaaacacacccaaggcccggccttcacaaaggagacccctcccccatttggctccctttccagcagtcgacggcctcttgtcagccatcgagcccagagtcccttgaagtgcgactcatgctggggtggtatgctcaggagccgcagtgtttccgctcagaggaaagggctctgattctcctgcagtgctaggagacttgtgggtggccacagtgcaggtcaggcacaccggccagcaccacccacagcccaaattcctaaagaaatatttgggtcccagcttggcccgagtctctgttgtcctggggaaggacatcaagatctgagtgtatgatggcctggggccttgcatgtggtgggggtccaagcctgcctctgctcacttgttctgcagactggcatgttctctgtgatacttacatacttgtttaacacttcagggaagaaaagtcagaagaccaggacctccagggcctcaaggacaaacccctcaagtttaaaaaggtgaagaaagataagaaagaagagaaagagggcaagcatgagcccgtgcagccatcagcccaccactctgctgagcccgcagaggcaggcaaagcagagacatcagaagggtcaggctccgccccggctgtgccggaagcttctgcctcccccaaacagcggcgctccatcatccgtgaccggggacccatgtatgatgaccccaccctgcctgaaggctggacacggaagcttaagcaaaggaaatctggccgctctgctgggaagtatgatgtgtatttgatcaagtaagtaagagcaactcctatctctacagggcagggagggcagggacaaggatccctcatggagcaggaaaatgtatgtgcccagggtggggtcggggggaacataaacaatgaacactgagaccaggtgtgcttgaaatgaccgtgtacagaggtcgctgccctgagtgggaagttctcaaggtagcaggccctctatcctctccacacctcaagtctttatctggggatggaatagctgcggaagcagaggaacttgcagagctaggggttcagaggggtgaagaagcatgtttcagttctgccttttaaatgatcccaaaaaggttagcagttttcaaatgacatttgcagacagcctcatttaattccatgagaagggtgagcaaaggattatcttgttgaaactgattcctggagagactgagcaccgtacctgagttcaaacttgggaatgttctagatggtgactcaggcccaggcaccaaccagcagaatgggcctcagcctgacaacccttctgtaccaggcctgactctttggttgctgaactttggagaggcctgggggggtcagcggcaggcagacgagtgagtggctttggtgacaggtcctcaggggcagccaggcagtgtgactctcgttcaatagtaacgtttgtcagagcgttgtcaccaccatccgctctgccctatctctgacattgctatggagagcctctaattgttccttgtgtctttctgtttgtccccacagtccccagggaaaagcctttcgctctaaagtggagttgattgcgtacttcgaaaaggtaggcgacacatccctggaccctaatgattttgacttcacggtaactgggagagggagcccctcccggcgagagcagaaaccacctaagaagcccaaatctcccaaagctccaggaactggcagaggccggggacgccccaaagggagcggcaccacgagacccaaggcggccacgtcagagggtgtgcaggtgaaaagggtcctggagaaaagtcctgggaagctccttgtcaagatgccttttcaaacttcgccagggggcaaggctgaggggggtggggccaccacatccacccaggtcatggtgatcaaacgccccggcaggaagcgaaaagctgaggccgaccctcaggccattcccaagaaacggggccgaaagccggggagtgtggtggcagccgctgccgccgaggccaaaaagaaagccgtgaaggagtcttctatccgatctgtgcaggagaccgtactccccatcaagaagcgcaagacccgggagacggtcagcatcgaggtcaaggaagtggtgaagcccctgctggtgtccaccctcggtgagaagagcgggaaaggactgaagacctgtaagagccctgggcggaaaagcaaggagagcagccccaaggggcgcagcagcagcgcctcctcaccccccaagaaggagcaccaccaccatcaccaccactcagagtccccaaaggcccccgtgccactgctcccacccctgcccccacctccacctgagcccgagagctccgaggaccccaccagcccccctgagccccaggacttgagcagcagcgtctgcaaagaggagaagatgcccagaggaggctcactggagagcgacggctgccccaaggagccagctaagactcagcccgcggttgccaccgccgccacggccgcagaaaagtaca

SEQ ID NO: 1100 - DNA, 4105 bp, Homo sapiens
gtggtccttgaccctcatcattttgtcccatctcctatgctgggctctgtatccttgtctccaagcagtctcgtgtgacagggaagttacctattattgtatggtcccctcttcttgtcacctctggtgtggcacttgttccatttcttgttcaatgaatgtgatttgtgaatgtgccacatctgtgggaggaaggcagttcgcagcaagagttgtagttcccttgctttgccctgagggccaggactttacactagatttttttgttgcattcctgcactcataaagtacacgtaaacttagaggtggtgtgttaaatgctagaacttaaaactgagttcagctaggctcaagtgccccacaatttttgtcccaccagacaatttcatgaatatctacagattgttccctcaatatgcctcaatattgaggcatattgatttggggagcacagacaagtcaaggttgatgtgcatccgctgaacatgatcttaagttgttgaagtaggtattattaatgaacgaacgtctattttagctccaagagcccctggtcttccagaagagactcccaatgatcttccagaagcagctgggcttcttttggtcctcccccacccaggtgcagtcccgttctccctgcctgggtgagtttgattcctctgccgtggaataggctaggctgctacctcttgagcctcttccaccaggccatccattaggtggcgacagagagcactaaaaggaactactatggaaataaaacttgttttgcttcttggggggaaaaaaaaagaaaaaggcttgtggggcgtgtgtgcattttagtcagattttactgtgcaaaacatttgagagatttctgccctctttctcccttccattcttctcaacccactgggcgccctaccacccctgtctccttcaagataaggtagatcagaagaccaaatagacaaatgccatgtccactgttttctgtcacagttgatagccataccagtcacccaagctggaaacccaacaggcccctgcccttcactgcccacatccaagggagccaccaagtcccacaaattgttcctttaactgtttgtccctcttttgtcttctgtcatcccttctaccgctgtcctggttcaatccctcatcttgctctgggactcccatgataacttatgatctttcctccacctctctatcttccacacaatccctatcatcaatctcattcccctgctttaaacccaagagtggcaccctgtgtttgagtgacatcagggcccctcatgtggctcctgcttctctttgtggccccttctgttgctgctgcttttcttatggacatagccctcagcagtccaggactgcttgtagttcctcccaggtaccatgtttcttgcactcctggcctttgtcattggctcccctgcccaagtccccttctcttctcctttccttcccctgtggccttgccttgtcgtgcttatccttgaagaccctgtcaggtatctcttccccaaagagccctgcctaaccaccgcccccctcccccccgcgacacacacacctgggttaggccctgcctctccacgcctgtgcctcctgccaagtcctcagaggtctctgatcccatgtgcctccaggcatggcatagggggactgtgacacagcctctcggcccacagacccctgattgtgggcttgctcactgccccagtcagtcctcttattgaggattccgtgccagttcctgactccagcacacacacgcatgtaggccgccctcctagtgcctggctccttccctgtctcttctgccactcattcccatggtcgtatcctggagttggtcatctctggaactccacccacggagttctaacttagctctgcctatgatgaggacttactgtcttcccagcttgcagtgtcaaccactgtttgatgcccctgggactccattggtcttccctcctcttgtgaactgtgcccatcaccagacgaacttgttttagaatttaccatcgtaactgagctcccttcagcgcatacctccttggctcctgctcagtctctgtttctccttttagccaaactctctaagagttctctccactcatgggccctcttccttgcctgctgctccttgctcagcttgctccatgaacacttgcttttccacattccatgaaataatcttaacagtcatcagtggctgtcactccttctcagccctttccttgtgtctcttctggtacctcatactctccaggtggccatctcacctcacatcttgaaccctctgggtttgggagaattctcacctcacgagttgatgggaggcctggcgacctctgattgtagtcactgcaaatgccagatgcttatttgcctagcttccctttcggtcagggcagcagttggcaaacggtatctcaagggccaagtccggcccactgcctgttttcgtaaatgaagctttaccaggacccagttccaccccgtcctttgtgcattgtccaagactgctctcctgtacaacagcaggtgggctggttgtgacagatactgtctggcccacaaggtggaaaatactatctggccccttacagaaagaaattacctgagttctacacgagggtgtaggtatgtaccctggcctctgccagtcagactcacatgctaggaggagcagggccaggcaggagagccgtgtctcctggcattggggctgcaggaaagacgagctcctaggccacagtgccagtggccagtgctgctgccttgcagggtcgcacaggcagtgctggctgtttggactggcttggcagaaggatttgaagtattgttcctagccaactggactcaaacctgttcctccaaccctctagggattctcttatcacccagtagccttttccccctagttttaaaaattgcagtaaaatacacaaaagataaaatgtactgccttaaccatttttaagtgtacaattctgtggtattgagcacatttatattgtgcaaccatcaccacatgcatcttcaatagcttttcatcagtccttgtctgcataaatcagctagagttggtttctattgattgccaccaataatcttgacagatatgtctgatcttccttctctgcactgactcctctttctctgtctcctctgctgattctttctcctcatcacaactccaaatagcagggggagggttgtttacacttatattcagcacgccctcacgcactcgcctggctcttcagacctctcccctgaactccagattcatacatccagctgccctttaggcctctagaaagctaaatacctcagtatcaaaaacatgagaaacggaagccagagtcctggatctctcgccctttcgctgtcccggtgcccatgcccttcagggatggcacctagaccagctccctgcatccctgcctagactctgcagtagtctcacgtggcagacccggaggtcactctcctctctggatgccctgcggacactccggttagcctcagctgcaagagcctcctcacccaaggtcacgccatttccaggacagcaccctggtgactgagcgaggtaagggtacaaggcccttatagggccttctctttgacttcttcccacctccctttatggatgtcagttcctgatgaacatcttacacctcaaaccgtgacccaacatctgcttctgcagagcccccctgtggcatcttgtgccctcctgccccactccctctactctatatcttcccatagttagaatgggctttttttttttttttttgagataaggtctccctttgtcacccaggctggaatgcaatggcacagtcacgactcactgcagcctcaacctcctgggctcaagcagtcctcccacctcagcctcccaagtagctgagactacaggtatgcaccaccacacctggctaatttttatattttttgtagagactggggtctccctatgttgcccgggctggtctcgaactcccaggctcaagcaatcctcccgccttggcctcccaaaatgcaggattacaggcgtgtaccagtgtgcccagcctcagatggg

SEQ ID NO: 1101 - DNA, 4046 bp, Homo sapiens
ggtcttcatctcttgaccttgtgatctgcccacctcggcctcccaaagtgctaggattacaggcatgagccaccacgctgggcctgctgttggcattttaaacatccttctagagtctttcttatttgcctgtaagcacgtacacatgttgttgttgttttgagacaaggtctgtcgcccaagctggagcacagtggtgcaatcacagctcactacagcttcgacctcttgggtgcaagtgatcctcccaatcagcctcccaagtaggtgggactacaggtgtccgctaccatgcccagctaatttttgtattttttttgtagagacggagtttcaccatgttgcccagactggtctcaaactcctttgctcaaacgatccttccgcctcggcctcccaaagtgccgggattacaagtgtgcacctctgtgcctggcccacatattgttttagatgaatgagatcatatatgtacttttgtaacttgctacctttcctcaacaaaatgttgtaaatatccatgtccataaaaatagacgtatatcttcacttttccctaaaatgaaaataacttaacttgcattttcttttttgtttttgtttttgttttgagacaggctcttgctctgttgctcaggctggagtgcagtgatgtcacagctcactacagcctccacctccagtttcaagtattccacctacctcagcctccaagatagctaagactacaggcacatgtcacgacgcctggctaatttttaaaatattttttgcagaaatgggatttcactatgttgcccaggctggcctcaaactgctggcctcaagtgatcttcctgccttggcctcccaaagtgctgggattacagtcgtgagccactgtgcccagcctgcattttcttattataaaagtaatacatgttcaatggacaaaaaattttcagaaaatatgcaaagatgaaaagtaaaaattgtccataaatctgtcatctacagataaagataacttctggataatgtttttctaccatcatttttagtaatcacataacatttcgttgtatgtctatgccttcatttaattaagaggcatttccattatttctgcatgttcatgactctgaatgatgatatgtctgcctgctgatggctacaaccctgtttctgcatttcaaacctctctcttgagctccagatttgatggcctcgtcagcatttacttgagttgctcataagtgtctcaaatttaacaagtcccagtcttgatttttttcccccttcaaacctattcctcatgttgtctctatttcagtaaacaatatcaacatccacccagttactcagtccaaaattctaggagtcatccttgattctgctctttctttttttttttttttttgagacggagtctcgctctgtcgcccaggccggactgcggactgcagtggcgcgatctcggctcactgcaagctccgcttcccgggttcacgccattctcctgcctcagcctcccgagtagctgggactacaggcgcccgccaccgcgcccggctaattttttgtatttttagtagagacggggtttcaccttgttagccaggatggtctcgatctcctgacctcatgatccacccgcctcggcctcccaaagtgctgggattacaggcgtgagccaccgcgcccggcctcttttttttttttgatacggagtctcattctcgtcatccaggctggagtgcagtggtgcaatcttggctcactgcaacctccgcctcccgggttcaagcaattcttctgccccaacctcctgagtagctgggcctggctaattttttgtatttttagtagagatggggtttcaccatgttggccaggctggtcctgaactcctgaccttgtgatccgcccacctcagcctcccaaagtgctgggattacaggcgtgagccactgcacccgccctgattctgctctttctctcatcatccctgatctgtcagcaagtcctgttaggccaaccacttctcagcatctgcactgccagtatgctagtccaagccacaaaacacctctcagaggtacgcaacaggactttgttgttgttgtgtgtgtgtgtgttttttttttttttacggtagaattattttataacttgaagtgtagggatgaccttccttttaaaattttatttattttcttaattttttattcccatagattttaggggaacaggtggtatttggtgacatgagtaagttctttaatggtgatttctgagattttggtgcacccatcacccgagcagtgtacactgaacccaatttgtagtcttttatccctcaccccctcccaccctttccctcaagtccccaaagtccattgtatcattctgatgcctttgcatcctcatagcttagctcccacttatgagtgagaacatacggtgtttggttttccattcctgagttacttcacttagaataatagtctctagttccatccaggttgctgtgaatgccattaagtcattcctttttatggctgagtagtattcctttgtatatatatgccacaatttctctattcactttctgattgatgggcatttgggctggttctatatttttgtaattgtgaattgtgctgctataagcatgcgtgtgcaagtatcattatgcaacgggacttcggatgacatattgaacaacttcctcactgatatccttgtgaaacgctacatatttcatgggtctgtttgttataccaacactcaattctgaatgatggaattatttcacatttagtctctttttcatctagccattatagtttagtttaaacaccaagttccattcctgctgcatgctgaaggatttgcagtacatcaggctatagtccatcaattcattccacaattgagtaagtaaggtatctatagtacctcaggccctgtgttaggcagggatggggtaacctagacagatttggtacctgtcctcatggagcttgactttagcggcagagacagatcttagataattgtaccagtacttaagtgttcagaaggacaagtatggaggtgggagccactccagtcctctacagtcacgtgctgcacaacaacgtttcaaccgacaacagagcacacatacagtggtgttcccataagattagaatgccatatttttactgtaccttttctatgtttagatatacaaatacttaccattgtgttccagtgatctacagtattcagtatagtaccatgctgtacagttttatagcccaggagcaataggctatataccgtatagcctaggtgtgtagtatgctacaccatctagatttgtgtaagaacactctctgatgttagcacaaataaatcgcccaatgacacatttctcagaacatatccctgttgttgagcgactcatgactgtacaatgggggaacagctcagcctgccttccccaaggaggcaacgccgatgcagggaaccgagggttgaacagaagtgggcaaggtgcagagaggaaaaaggctttccagatggagaagagcatgtgtgaaggccctcagtctggcaagagcttagtcctgtgtggcaggagctgaacgaggggttaggggagagtggcaaagggtccgggccatcagagaggtcaacaggggctggatcatgcaggattttgaatgttaacatcagagcgatagaaaacatgaagggtaaggtggtttgggttttgaatttttatcaaaatattgcaactactcggcaacaagttagatataacaaaagaggtcatcgtaaaaacagcagtctaccccttccccttcccttccctgactcagacatgacagcttttaactgtttctgattttagttcctttgatggttacctccaaaattaaatcatatgcttatacatctttcttgatttgccaactttagggaactgtgttaactccctgaaatgaaagagaatgacttagcttacgttacctccccatgttgaaattcatattcacatttctctgtaatttttt

SEQ ID NO: 1102 - DNA, 4041 bp, Homo sapiens
tttcatatcatattatagttgttacagatattttgaaatatatatgtccatcactgcttcaaacttaaggtaattattagacccatctctagatctggttatttaatgatttactgaagaagcacatattatttgagaacgaactcttgaaatatgttgttaatttctgtgcattttacacatttcaaaacattcttctgaggaggggtccagaaggccaaaagggtccatggcagaaaaaggttaagaacacctgttctgtactttgtaccatgtggctacaaatataaaaacagacgttaagccgggtatggtgatgcacacctgtagttccacctacttgggaggctgaggtgggaaaatcacttgagcccaggagtttgaggccagcctgggcaacagagcaagaccccatctcttaaaaaccagtcagcacttgactagtcagttagtgggggaaaacacaggtacagtaaaaggagtcaaaattacacttaaacttaggtcatcttattatatcaaacatttattaacatgtttagtgttttgtgtatattatgcaaagtgtaatgcaactaaaactgtttaacacttctcgatatcacataaatttgttggtgcataatagcctaaaagttacttttgctgttggcattttattttattacttacttatttatttatttatttatttattttgagacagagtcacactgtcgccaggctggagtgcagtggtgcgatctcagctcactgcaacctctgcctccctggttcaagcgattctcccgcctcagcctcctgactagctgggactacaggtgcgcgccaccatgcccagctaatttttgtatttttagtagagatagggtttcgccatgttggccaggatggtcttcatctcttgaccttgtgatctgcccacctcggcctcccaaagtgctaggattacaggcatgagccaccacgctgggcctgctgttggcattttaaacatccttctagagtctttcttatttgcctgtaagcacgtacacatgttgttgttgttttgagacaaggtctgtcgcccaagctggagcacagtggtgcaatcacagctcactacagcttcgacctcttgggtgcaagtgatcctcccaatcagcctcccaagtaggtgggactacaggtgtccgctaccatgcccagctaatttttgtattttttttgtagagacggagtttcaccatgttgcccagactggtctcaaactcctttgctcaaacgatccttccgcctcggcctcccaaagtgccgggattacaagtgtgcacctctgtgcctggcccacatattgttttagatgaatgagatcatatatgtacttttgtaacttgctacctttcctcaacaaaatgttgtaaatatccatgtccataaaaatagacgtatatcttcacttttccctaaaatgaaaataacttaacttgcattttcttttttgtttttgtttttgttttgagacaggctcttgctctgttgctcaggctggagtgcagtgatgtcacagctcactacagcctccacctccagtttcaagtattccacctacctcagcctccaagatagctaagactacaggcacatgtcacgacgcctggctaatttttaaaatattttttgcagaaatgggatttcactatgttgcccaggctggcctcaaactgctggcctcaagtgatcttcctgccttggcctcccaaagtgctgggattacagtcgtgagccactgtgcccagcctgcattttcttattataaaagtaatacatgttcaatggacaaaaaattttcagaaaatatgcaaagatgaaaagtaaaaattgtccataaatctgtcatctacagataaagataacttctggataatgtttttctaccatcatttttagtaatcacataacatttcgttgtatgtctatgccttcatttaattaagaggcatttccattatttctgcatgttcatgactctgaatgatgatatgtctgcctgctgatggctacaaccctgtttctgcatttcaaacctctctcttgagctccagatttgatggcctcgtcagcatttacttgagttgctcataagtgtctcaaatttaacaagtcccagtcttgatttttttcccccttcaaacctattcctcatgttgtctctatttcagtaaacaatatcaacatccacccagttactcagtccaaaattctaggagtcatccttgattctgctctttctttttttttttttttttgagacggagtctcgctctgtcgcccaggccggactgcggactgcagtggcgcgatctcggctcactgcaagctccgcttcccgggttcacgccattctcctgcctcagcctcccgagtagctgggactacaggcgcccgccaccgcgcccggctaattttttgtatttttagtagagacggggtttcaccttgttagccaggatggtctcgatctcctgacctcatgatccacccgcctcggcctcccaaagtgctgggattacaggcgtgagccaccgcgcccggcctcttttttttttttgatacggagtctcattctcgtcatccaggctggagtgcagtggtgcaatcttggctcactgcaacctccgcctcccgggttcaagcaattcttctgccccaacctcctgagtagctgggcctggctaattttttgtatttttagtagagatggggtttcaccatgttggccaggctggtcctgaactcctgaccttgtgatccgcccacctcagcctcccaaagtgctgggattacaggcgtgagccactgcacccgccctgattctgctctttctctcatcatccctgatctgtcagcaagtcctgttaggccaaccacttctcagcatctgcactgccagtatgctagtccaagccacaaaacacctctcagaggtacgcaacaggactttgttgttgttgtgtgtgtgtgtgttttttttttttttacggtagaattattttataacttgaagtgtagggatgaccttccttttaaaattttatttattttcttaattttttattcccatagattttaggggaacaggtggtatttggtgacatgagtaagttctttaatggtgatttctgagattttggtgcacccatcacccgagcagtgtacactgaacccaatttgtagtcttttatccctcaccccctcccaccctttccctcaagtccccaaagtccattgtatcattctgatgcctttgcatcctcatagcttagctcccacttatgagtgagaacatacggtgtttggttttccattcctgagttacttcacttagaataatagtctctagttccatccaggttgctgtgaatgccattaagtcattcctttttatggctgagtagtattcctttgtatatatatgccacaatttctctattcactttctgattgatgggcatttgggctggttctatatttttgtaattgtgaattgtgctgctataagcatgcgtgtgcaagtatcattatgcaacgggacttcggatgacatattgaacaacttcctcactgatatccttgtgaaacgctacatatttcatgggtctgtttgttataccaacactcaattctgaatgatggaattatttcacatttagtctctttttcatctagccattatagtttagtttaaacaccaagttccattcctgctgcatgctgaaggatttgcagtacatcaggctatagtccatcaattcattccacaattgagtaagtaaggtatctatagtacctcaggccctgtgttaggcagggatggggtaacctagacagatttggtacctgtcctcatggagcttgactttagcggcagagacagatcttagataattgtaccagtacttaagtgttcagaaggacaagtatggaggtgggagccactccagtcctctacagtcacgtgctgcacaacaacgtttcaaccgacaacagagcacacat

SEQ ID NO: 1103 - DNA, 4048 bp, Homo sapiens
gggtttcactgtgttgcccaggctggtcttgaactccttgggcttgagtaatcctcctgccttggcctcccaaagtgccgagattacaaccatgagccatggagcccgacaagagtagccttttatttgcagaccattagagaaaaagttgcgtgtaagtagataagcatacgaatttatcactgcaatactgtttgtagagatcacagagctgttaggctaggaagaagtttttagcagttagcactagaaagcaaaactttggaaacttccatttcatcaaaagtgacctcatctgagtagggcatgtgagggaaggacctttttactcgacaaggggaacttgccagttcttgtttgtgaaccttgaagaaagtggagcatttttattttgggaccattctaggttgtggtagttccttggtactcggggttggagaatctccctctgctgctggaccttctgcctcctcatgctgtaatatgcataagaggtgtcctagaagtattcaggaacaggctgtggttgctttgttgttctgtgactgttgaactctttatatagcagtacttttttaagctgtactaattgagcatttattatgtgtcagttactgtgctagctgctggaaactatcctaccctcagcagtcttctggtctaatgggaggtacagacaggcaaatgggctatgactttacaagaggctaacttctgtgatggagagaagttccagccactaagggagcacataaaaatcagaggagatcctaccaagaattgggaggtaggtcagggaggagacttctttgaaaaatggcatctaagacctgaacagcaaggaaacattagctaggtcaaggacaaagcatcagtggggagagatgcatgagtcttttggaaggaccagcatgtgtagaggctctgacaggagagaatctctcaggcccattcagagagtccactgtgtgaagacgaggcatgaacaaccagccaggacatgtggagaggagcatttttctttttttcttttttctttcttttttttttttttttttttttgagacgtctttctctgtcacccaggctggagtgcaatggcatgatctcggctcactgcaacccccacttccagggttcaagcaattcttctgccttagcctcccaagcagctaggattacaggcacccgccaccatgcccggttaatttttgtatttttagtagagacggagtttcaccatgttggcctcaaactcctgaccttaggtgatccacccgtctcggcctcccagagtgctgggattacaggtgagagcccccacgcccggccaggctcggctttctttccaggccccgtcacactcttagatgttccctgggccccagaaggcagcgtgaggtgctctgcccatctatgctgtccttttccaccccaccctatccactgggcccctggggctcccactccactccaggtctcttcatggacccttctttcccttcacttctgtcccaggagacctgggagactcatgggaacaggcatcatcttctccagcacagttcattgtctaatgcacgaaagtgctgggctgtgagaaggtcaggagcttacatggaatgggagtcagctgtggtacaaagtacgctgcttagttctactgattttttattttttatttttacataagactttgatggtaaaggaagcagtgtgtgagcaagctgactcctgtcttgtcaagtaccaggtccactctgatgagcccctgtggacagcactgctgtaactccccaagcctgggctcaggaggtgggccctaagcgctgttcccagctcttcctccatgctgtcagctcttccaccattcttcctggcgtcattctaaggtcctgtcttcccccgccctcttccttcctggcttctacgctcagctcaagtagtagctgtttgggtacttttcacccagacttaggaaatgttatcagttggtcgtattcctgtcagccctcttactatggaactcaaataggacagattcagctgaattcccagccctgtggttgcactctttgtctgccctgcttccccaaggtagcctgctccctaaaggtcaccgagatactccccatgcaaggtttttgttgtattacacatgacaacatggaataaagtgttttgcaaatttactggatgatatcctactatgtggaacatcctacaacttactcttttcactcaacatttgacttttgaacctggtctgtattgctccgtgcagaccaatgttcattcatttgatatgtctccttgtgccatagaaatagttttacaatagaagcctgtccagagccatgagggagaaggggattgtagagaaacaaggattggcatctggtttatgtttacatcctttagtcctgttaaccgagaagaagatatttttatttccatgtttgcgaaagctttccacaaaaaaaagcatccattttctagacttattaatagggcagtccaaaggttttatttttagatttgaaagaaagcaaagtaggcttctgagatatgcacatttccctgtgtccctgtctcttttgcaacattccacattgctgctaaaacttgaacatgagcactttcaagcatgtgcttactttctatgtatgactcattttttaaaacattaaagcattttcggccgggtgtggtggctcacgcctatattcctagcactttagaaggccgaggcgggtagatcacttgaggtcaggagttcaagaccagcctagccaatatagtgaaaccccatctccactaaaaatacaaaaattagccgggcatggtggcgggcgcctgtaatcccagctactcgggaggctgaggcaggagaattgcttgaacccaggaggtggaggttgcagtgagcagagatcgagccactgcactctagcctaggtgacagagcgagactctgtctcaaaaaaataaaaataaagcattaaagcactttgtctggtggtatgtaagttttggcattacttagataagttgtattttaagtctttctacacacaataacttatttttaaaatacaagtttctgtgtacttccgggttttgtgtttttgtaaacagcagaaggtattagtccatattaagtactaatttgttctaatattttcagctgtttttggaattacacttggcaaaaaaatagacaaatgtctgcagttgtgacagtttgtttttttgttctttttaactccagaataaataattctagtgagtttttttcttggcttgtaagaacatgggaatgattagagtcatcataacacttaagtagttatagaaggttgaacatctgtagtcagttgtataaaatttcctagtcatccttccaggttgtttaagacaaacaaatacatagtatttattaagctcttataaattttaattgtaaaacatcattgtacaaaactttgaaaatgcgtataggtacaaagataaaaaattaggccaggcatgccatggctcacgcctgtaatcccagcactttgggaggccaaggtgggaggatcttttgagcccaggagttcaagaccagcctgagcaacatattgagaccctatctctacaaaaatatcataaaacaaaatagaatcactctggcgattccactatccaaaaaaaaaaaaaactgctgttaatatttggtatgtatctttctagaccaaggcctccaactttggttgagaattcagccgggtctgtgaccttggatgggaaaaacattcactctttattttcactaatgtctctgaaaacccagatttttagctgggcatggtggctcgtgcctgtaatcccagtgctttggaagcccgtggagggcagatcacttgagcccaggagtttgagaccagcctgggcaacatagcaagaccctgtcttttaaaaaaaaaaaaaatccagccgggtgtggtggctcatgcctgtaatcccagcactttgagaggctgaggcaggcagatcacctgaggtc

SEQ ID NO: 1104 - DNA, 4024 bp, Homo sapiens
ttagaatcggttcatacagagccgtatcattccttttaagggttgggtttaaatagtctgttatggatgtaccacaatttatttaaccagtttttaaattttttacttattttttttaatgtttttttagagacaggatcccactccatcacccagactggagtgcaacagcatgatcatagcttactgcagccttgaactccggggctgatgtgatcctcccacctcaggctctcttgtagctgggactacagggatgtgccgccatgcctggctaaattttttatttttatttttatttttatttttggtagacacggggtttcactgtgttgcccaggctggtcttgaactccttgggcttgagtaatcctcctgccttggcctcccaaagtgccgagattacaaccatgagccatggagcccgacaagagtagccttttatttgcagaccattagagaaaaagttgcgtgtaagtagataagcatacgaatttatcactgcaatactgtttgtagagatcacagagctgttaggctaggaagaagtttttagcagttagcactagaaagcaaaactttggaaacttccatttcatcaaaagtgacctcatctgagtagggcatgtgagggaaggacctttttactcgacaaggggaacttgccagttcttgtttgtgaaccttgaagaaagtggagcatttttattttgggaccattctaggttgtggtagttccttggtactcggggttggagaatctccctctgctgctggaccttctgcctcctcatgctgtaatatgcataagaggtgtcctagaagtattcaggaacaggctgtggttgctttgttgttctgtgactgttgaactctttatatagcagtacttttttaagctgtactaattgagcatttattatgtgtcagttactgtgctagctgctggaaactatcctaccctcagcagtcttctggtctaatgggaggtacagacaggcaaatgggctatgactttacaagaggctaacttctgtgatggagagaagttccagccactaagggagcacataaaaatcagaggagatcctaccaagaattgggaggtaggtcagggaggagacttctttgaaaaatggcatctaagacctgaacagcaaggaaacattagctaggtcaaggacaaagcatcagtggggagagatgcatgagtcttttggaaggaccagcatgtgtagaggctctgacaggagagaatctctcaggcccattcagagagtccactgtgtgaagacgaggcatgaacaaccagccaggacatgtggagaggagcatttttctttttttcttttttctttcttttttttttttttttttttttgagacgtctttctctgtcacccaggctggagtgcaatggcatgatctcggctcactgcaacccccacttccagggttcaagcaattcttctgccttagcctcccaagcagctaggattacaggcacccgccaccatgcccggttaatttttgtatttttagtagagacggagtttcaccatgttggcctcaaactcctgaccttaggtgatccacccgtctcggcctcccagagtgctgggattacaggtgagagcccccacgcccggccaggctcggctttctttccaggccccgtcacactcttagatgttccctgggccccagaaggcagcgtgaggtgctctgcccatctatgctgtccttttccaccccaccctatccactgggcccctggggctcccactccactccaggtctcttcatggacccttctttcccttcacttctgtcccaggagacctgggagactcatgggaacaggcatcatcttctccagcacagttcattgtctaatgcacgaaagtgctgggctgtgagaaggtcaggagcttacatggaatgggagtcagctgtggtacaaagtacgctgcttagttctactgattttttattttttatttttacataagactttgatggtaaaggaagcagtgtgtgagcaagctgactcctgtcttgtcaagtaccaggtccactctgatgagcccctgtggacagcactgctgtaactccccaagcctgggctcaggaggtgggccctaagcgctgttcccagctcttcctccatgctgtcagctcttccaccattcttcctggcgtcattctaaggtcctgtcttcccccgccctcttccttcctggcttctacgctcagctcaagtagtagctgtttgggtacttttcacccagacttaggaaatgttatcagttggtcgtattcctgtcagccctcttactatggaactcaaataggacagattcagctgaattcccagccctgtggttgcactctttgtctgccctgcttccccaaggtagcctgctccctaaaggtcaccgagatactccccatgcaaggtttttgttgtattacacatgacaacatggaataaagtgttttgcaaatttactggatgatatcctactatgtggaacatcctacaacttactcttttcactcaacatttgacttttgaacctggtctgtattgctccgtgcagaccaatgttcattcatttgatatgtctccttgtgccatagaaatagttttacaatagaagcctgtccagagccatgagggagaaggggattgtagagaaacaaggattggcatctggtttatgtttacatcctttagtcctgttaaccgagaagaagatatttttatttccatgtttgcgaaagctttccacaaaaaaaagcatccattttctagacttattaatagggcagtccaaaggttttatttttagatttgaaagaaagcaaagtaggcttctgagatatgcacatttccctgtgtccctgtctcttttgcaacattccacattgctgctaaaacttgaacatgagcactttcaagcatgtgcttactttctatgtatgactcattttttaaaacattaaagcattttcggccgggtgtggtggctcacgcctatattcctagcactttagaaggccgaggcgggtagatcacttgaggtcaggagttcaagaccagcctagccaatatagtgaaaccccatctccactaaaaatacaaaaattagccgggcatggtggcgggcgcctgtaatcccagctactcgggaggctgaggcaggagaattgcttgaacccaggaggtggaggttgcagtgagcagagatcgagccactgcactctagcctaggtgacagagcgagactctgtctcaaaaaaataaaaataaagcattaaagcactttgtctggtggtatgtaagttttggcattacttagataagttgtattttaagtctttctacacacaataacttatttttaaaatacaagtttctgtgtacttccgggttttgtgtttttgtaaacagcagaaggtattagtccatattaagtactaatttgttctaatattttcagctgtttttggaattacacttggcaaaaaaatagacaaatgtctgcagttgtgacagtttgtttttttgttctttttaactccagaataaataattctagtgagtttttttcttggcttgtaagaacatgggaatgattagagtcatcataacacttaagtagttatagaaggttgaacatctgtagtcagttgtataaaatttcctagtcatccttccaggttgtttaagacaaacaaatacatagtatttattaagctcttataaattttaattgtaaaacatcattgtacaaaactttgaaaatgcgtataggtacaaagataaaaaattaggccaggcatgccatggctcacgcctgtaatcccagcactttgggaggccaaggtgggaggatcttttgagcccaggagttcaagaccagcctgagcaacatattgagaccctatctctacaaaaatatcataaaacaaaatagaatcactctggcgattccactatccaaaaaaaaaaaaaact

SEQ ID NO: 1105 - DNA, 4043 bp, Homo sapiens
cttctcccctttcccccaccccaccctctggcaactactattctactctttgtctctattggacatatttttgtgtgtttaggtttgtgtatatattttacatgtgtgtataaatacacaagggtatgtgggcgttgtgtttttacacatactataaaatattgtgcacatttgtttattttaatgtatcctgtagattatttagaatcggttcatacagagccgtatcattccttttaagggttgggtttaaatagtctgttatggatgtaccacaatttatttaaccagtttttaaattttttacttattttttttaatgtttttttagagacaggatcccactccatcacccagactggagtgcaacagcatgatcatagcttactgcagccttgaactccggggctgatgtgatcctcccacctcaggctctcttgtagctgggactacagggatgtgccgccatgcctggctaaattttttatttttatttttatttttatttttggtagacacggggtttcactgtgttgcccaggctggtcttgaactccttgggcttgagtaatcctcctgccttggcctcccaaagtgccgagattacaaccatgagccatggagcccgacaagagtagccttttatttgcagaccattagagaaaaagttgcgtgtaagtagataagcatacgaatttatcactgcaatactgtttgtagagatcacagagctgttaggctaggaagaagtttttagcagttagcactagaaagcaaaactttggaaacttccatttcatcaaaagtgacctcatctgagtagggcatgtgagggaaggacctttttactcgacaaggggaacttgccagttcttgtttgtgaaccttgaagaaagtggagcatttttattttgggaccattctaggttgtggtagttccttggtactcggggttggagaatctccctctgctgctggaccttctgcctcctcatgctgtaatatgcataagaggtgtcctagaagtattcaggaacaggctgtggttgctttgttgttctgtgactgttgaactctttatatagcagtacttttttaagctgtactaattgagcatttattatgtgtcagttactgtgctagctgctggaaactatcctaccctcagcagtcttctggtctaatgggaggtacagacaggcaaatgggctatgactttacaagaggctaacttctgtgatggagagaagttccagccactaagggagcacataaaaatcagaggagatcctaccaagaattgggaggtaggtcagggaggagacttctttgaaaaatggcatctaagacctgaacagcaaggaaacattagctaggtcaaggacaaagcatcagtggggagagatgcatgagtcttttggaaggaccagcatgtgtagaggctctgacaggagagaatctctcaggcccattcagagagtccactgtgtgaagacgaggcatgaacaaccagccaggacatgtggagaggagcatttttctttttttcttttttctttcttttttttttttttttttttttgagacgtctttctctgtcacccaggctggagtgcaatggcatgatctcggctcactgcaacccccacttccagggttcaagcaattcttctgccttagcctcccaagcagctaggattacaggcacccgccaccatgcccggttaatttttgtatttttagtagagacggagtttcaccatgttggcctcaaactcctgaccttaggtgatccacccgtctcggcctcccagagtgctgggattacaggtgagagcccccacgcccggccaggctcggctttctttccaggccccgtcacactcttagatgttccctgggccccagaaggcagcgtgaggtgctctgcccatctatgctgtccttttccaccccaccctatccactgggcccctggggctcccactccactccaggtctcttcatggacccttctttcccttcacttctgtcccaggagacctgggagactcatgggaacaggcatcatcttctccagcacagttcattgtctaatgcacgaaagtgctgggctgtgagaaggtcaggagcttacatggaatgggagtcagctgtggtacaaagtacgctgcttagttctactgattttttattttttatttttacataagactttgatggtaaaggaagcagtgtgtgagcaagctgactcctgtcttgtcaagtaccaggtccactctgatgagcccctgtggacagcactgctgtaactccccaagcctgggctcaggaggtgggccctaagcgctgttcccagctcttcctccatgctgtcagctcttccaccattcttcctggcgtcattctaaggtcctgtcttcccccgccctcttccttcctggcttctacgctcagctcaagtagtagctgtttgggtacttttcacccagacttaggaaatgttatcagttggtcgtattcctgtcagccctcttactatggaactcaaataggacagattcagctgaattcccagccctgtggttgcactctttgtctgccctgcttccccaaggtagcctgctccctaaaggtcaccgagatactccccatgcaaggtttttgttgtattacacatgacaacatggaataaagtgttttgcaaatttactggatgatatcctactatgtggaacatcctacaacttactcttttcactcaacatttgacttttgaacctggtctgtattgctccgtgcagaccaatgttcattcatttgatatgtctccttgtgccatagaaatagttttacaatagaagcctgtccagagccatgagggagaaggggattgtagagaaacaaggattggcatctggtttatgtttacatcctttagtcctgttaaccgagaagaagatatttttatttccatgtttgcgaaagctttccacaaaaaaaagcatccattttctagacttattaatagggcagtccaaaggttttatttttagatttgaaagaaagcaaagtaggcttctgagatatgcacatttccctgtgtccctgtctcttttgcaacattccacattgctgctaaaacttgaacatgagcactttcaagcatgtgcttactttctatgtatgactcattttttaaaacattaaagcattttcggccgggtgtggtggctcacgcctatattcctagcactttagaaggccgaggcgggtagatcacttgaggtcaggagttcaagaccagcctagccaatatagtgaaaccccatctccactaaaaatacaaaaattagccgggcatggtggcgggcgcctgtaatcccagctactcgggaggctgaggcaggagaattgcttgaacccaggaggtggaggttgcagtgagcagagatcgagccactgcactctagcctaggtgacagagcgagactctgtctcaaaaaaataaaaataaagcattaaagcactttgtctggtggtatgtaagttttggcattacttagataagttgtattttaagtctttctacacacaataacttatttttaaaatacaagtttctgtgtacttccgggttttgtgtttttgtaaacagcagaaggtattagtccatattaagtactaatttgttctaatattttcagctgtttttggaattacacttggcaaaaaaatagacaaatgtctgcagttgtgacagtttgtttttttgttctttttaactccagaataaataattctagtgagtttttttcttggcttgtaagaacatgggaatgattagagtcatcataacacttaagtagttatagaaggttgaacatctgtagtcagttgtataaaatttcctagtcatccttccaggttgtttaagacaaacaaatacatagtatttattaagctcttataaattttaattgtaaaacatcattgtacaaaactttgaaaatgcgtataggtacaaagataaaaaattaggc

SEQ ID NO: 1106 - DNA, 4040 bp, Homo sapiens
caaaaaaaaaagcgtgtgtgtacccgtgtgttaaatttttattataaaatatatataacaggctgggcgtggtggctcacgcctgtaatcccagcactttgggaggccgaggcaggctgatcacgaggtcaggagatcgagaccatcctggcgagcacggtgaaacctcgtctttactaaaaatacaaaaaattagccgggcatggtggcgggcgcctgtagtcccagctactctgagagcctgaggcaggagaatggcgtgaacccaggaggcggagcttgcagtgagccgagatcgcgtcactgcactccagcctgggcgacagaccgagactccgtctcaaaaaatatatatcgatatatataacaatttacagttttaatcatcttaactgtacagttcagtggcactgagtacattcacattgttgtacagccattactaccatccatctctacaacctttcgtcttgcaaaactgaaatttcatacctattaaacactaactcccacttctcccctttcccccaccccaccctctggcaactactattctactctttgtctctattggacatatttttgtgtgtttaggtttgtgtatatattttacatgtgtgtataaatacacaagggtatgtgggcgttgtgtttttacacatactataaaatattgtgcacatttgtttattttaatgtatcctgtagattatttagaatcggttcatacagagccgtatcattccttttaagggttgggtttaaatagtctgttatggatgtaccacaatttatttaaccagtttttaaattttttacttattttttttaatgtttttttagagacaggatcccactccatcacccagactggagtgcaacagcatgatcatagcttactgcagccttgaactccggggctgatgtgatcctcccacctcaggctctcttgtagctgggactacagggatgtgccgccatgcctggctaaattttttatttttatttttatttttatttttggtagacacggggtttcactgtgttgcccaggctggtcttgaactccttgggcttgagtaatcctcctgccttggcctcccaaagtgccgagattacaaccatgagccatggagcccgacaagagtagccttttatttgcagaccattagagaaaaagttgcgtgtaagtagataagcatacgaatttatcactgcaatactgtttgtagagatcacagagctgttaggctaggaagaagtttttagcagttagcactagaaagcaaaactttggaaacttccatttcatcaaaagtgacctcatctgagtagggcatgtgagggaaggacctttttactcgacaaggggaacttgccagttcttgtttgtgaaccttgaagaaagtggagcatttttattttgggaccattctaggttgtggtagttccttggtactcggggttggagaatctccctctgctgctggaccttctgcctcctcatgctgtaatatgcataagaggtgtcctagaagtattcaggaacaggctgtggttgctttgttgttctgtgactgttgaactctttatatagcagtacttttttaagctgtactaattgagcatttattatgtgtcagttactgtgctagctgctggaaactatcctaccctcagcagtcttctggtctaatgggaggtacagacaggcaaatgggctatgactttacaagaggctaacttctgtgatggagagaagttccagccactaagggagcacataaaaatcagaggagatcctaccaagaattgggaggtaggtcagggaggagacttctttgaaaaatggcatctaagacctgaacagcaaggaaacattagctaggtcaaggacaaagcatcagtggggagagatgcatgagtcttttggaaggaccagcatgtgtagaggctctgacaggagagaatctctcaggcccattcagagagtccactgtgtgaagacgaggcatgaacaaccagccaggacatgtggagaggagcatttttctttttttcttttttctttcttttttttttttttttttttttgagacgtctttctctgtcacccaggctggagtgcaatggcatgatctcggctcactgcaacccccacttccagggttcaagcaattcttctgccttagcctcccaagcagctaggattacaggcacccgccaccatgcccggttaatttttgtatttttagtagagacggagtttcaccatgttggcctcaaactcctgaccttaggtgatccacccgtctcggcctcccagagtgctgggattacaggtgagagcccccacgcccggccaggctcggctttctttccaggccccgtcacactcttagatgttccctgggccccagaaggcagcgtgaggtgctctgcccatctatgctgtccttttccaccccaccctatccactgggcccctggggctcccactccactccaggtctcttcatggacccttctttcccttcacttctgtcccaggagacctgggagactcatgggaacaggcatcatcttctccagcacagttcattgtctaatgcacgaaagtgctgggctgtgagaaggtcaggagcttacatggaatgggagtcagctgtggtacaaagtacgctgcttagttctactgattttttattttttatttttacataagactttgatggtaaaggaagcagtgtgtgagcaagctgactcctgtcttgtcaagtaccaggtccactctgatgagcccctgtggacagcactgctgtaactccccaagcctgggctcaggaggtgggccctaagcgctgttcccagctcttcctccatgctgtcagctcttccaccattcttcctggcgtcattctaaggtcctgtcttcccccgccctcttccttcctggcttctacgctcagctcaagtagtagctgtttgggtacttttcacccagacttaggaaatgttatcagttggtcgtattcctgtcagccctcttactatggaactcaaataggacagattcagctgaattcccagccctgtggttgcactctttgtctgccctgcttccccaaggtagcctgctccctaaaggtcaccgagatactccccatgcaaggtttttgttgtattacacatgacaacatggaataaagtgttttgcaaatttactggatgatatcctactatgtggaacatcctacaacttactcttttcactcaacatttgacttttgaacctggtctgtattgctccgtgcagaccaatgttcattcatttgatatgtctccttgtgccatagaaatagttttacaatagaagcctgtccagagccatgagggagaaggggattgtagagaaacaaggattggcatctggtttatgtttacatcctttagtcctgttaaccgagaagaagatatttttatttccatgtttgcgaaagctttccacaaaaaaaagcatccattttctagacttattaatagggcagtccaaaggttttatttttagatttgaaagaaagcaaagtaggcttctgagatatgcacatttccctgtgtccctgtctcttttgcaacattccacattgctgctaaaacttgaacatgagcactttcaagcatgtgcttactttctatgtatgactcattttttaaaacattaaagcattttcggccgggtgtggtggctcacgcctatattcctagcactttagaaggccgaggcgggtagatcacttgaggtcaggagttcaagaccagcctagccaatatagtgaaaccccatctccactaaaaatacaaaaattagccgggcatggtggcgggcgcctgtaatcccagctactcgggaggctgaggcaggagaattgcttgaacccaggaggtggaggttgcagtgagcagagatcgagccactgcactctagcctaggtgacagagcgagactctgtctcaaaaaaataaaaataaagcattaaagc

SEQ ID NO: 1107 - DNA, 4025 bp, Homo sapiens
aggcagaggttgcagtgagccaagatcgtgccattgcactccagcctgggcgacagagtgagactccatctcagaaaaataataatagaaaaaagttatatggggctgggcatggtggctcatgcctgtaatcccagcagtttgggaggctgaggcagcttgatcacttgaggtcaggaattcgagactagcctggccaacatggtgaaactccgtctccactaaaaatacaaaaattagccaagcgtggtggtgcgtgcctgtagtcccagctacttgggaagctgaggcaggagaatcgcctgaacctgggaggcagaggttgcagtgagccaagatcatgccgttgcactccagcctggacgacaagagcggaactccgtctcaaaaaaaaaaaaaaaagagttatattgtaaagtatctctgctaccctgccccaaacattcatttctttccctggaggcagccactattacctgtttctttaaaaaaaaaaaaaaattgtggccgggcacggtggctcacgcctgtaatcctagcactttgggaggtggaggtgggtggatcatgaggtcaagagatcgagaccatcttggccaacatggtaaaaccccatctctactaaaaatacaaaaaattagccgggcatggtggcgggcacctgtagtcccagctactcgggaggctgaggcaggagaatcgcttgaacctgggaggcagaggttgcagtgaactgagatcacgccgctgcactccagcctggcaacagaatgagactccatctcaaaaaaaaaagcgtgtgtgtacccgtgtgttaaatttttattataaaatatatataacaggctgggcgtggtggctcacgcctgtaatcccagcactttgggaggccgaggcaggctgatcacgaggtcaggagatcgagaccatcctggcgagcacggtgaaacctcgtctttactaaaaatacaaaaaattagccgggcatggtggcgggcgcctgtagtcccagctactctgagagcctgaggcaggagaatggcgtgaacccaggaggcggagcttgcagtgagccgagatcgcgtcactgcactccagcctgggcgacagaccgagactccgtctcaaaaaatatatatcgatatatataacaatttacagttttaatcatcttaactgtacagttcagtggcactgagtacattcacattgttgtacagccattactaccatccatctctacaacctttcgtcttgcaaaactgaaatttcatacctattaaacactaactcccacttctcccctttcccccaccccaccctctggcaactactattctactctttgtctctattggacatatttttgtgtgtttaggtttgtgtatatattttacatgtgtgtataaatacacaagggtatgtgggcgttgtgtttttacacatactataaaatattgtgcacatttgtttattttaatgtatcctgtagattatttagaatcggttcatacagagccgtatcattccttttaagggttgggtttaaatagtctgttatggatgtaccacaatttatttaaccagtttttaaattttttacttattttttttaatgtttttttagagacaggatcccactccatcacccagactggagtgcaacagcatgatcatagcttactgcagccttgaactccggggctgatgtgatcctcccacctcaggctctcttgtagctgggactacagggatgtgccgccatgcctggctaaattttttatttttatttttatttttatttttggtagacacggggtttcactgtgttgcccaggctggtcttgaactccttgggcttgagtaatcctcctgccttggcctcccaaagtgccgagattacaaccatgagccatggagcccgacaagagtagccttttatttgcagaccattagagaaaaagttgcgtgtaagtagataagcatacgaatttatcactgcaatactgtttgtagagatcacagagctgttaggctaggaagaagtttttagcagttagcactagaaagcaaaactttggaaacttccatttcatcaaaagtgacctcatctgagtagggcatgtgagggaaggacctttttactcgacaaggggaacttgccagttcttgtttgtgaaccttgaagaaagtggagcatttttattttgggaccattctaggttgtggtagttccttggtactcggggttggagaatctccctctgctgctggaccttctgcctcctcatgctgtaatatgcataagaggtgtcctagaagtattcaggaacaggctgtggttgctttgttgttctgtgactgttgaactctttatatagcagtacttttttaagctgtactaattgagcatttattatgtgtcagttactgtgctagctgctggaaactatcctaccctcagcagtcttctggtctaatgggaggtacagacaggcaaatgggctatgactttacaagaggctaacttctgtgatggagagaagttccagccactaagggagcacataaaaatcagaggagatcctaccaagaattgggaggtaggtcagggaggagacttctttgaaaaatggcatctaagacctgaacagcaaggaaacattagctaggtcaaggacaaagcatcagtggggagagatgcatgagtcttttggaaggaccagcatgtgtagaggctctgacaggagagaatctctcaggcccattcagagagtccactgtgtgaagacgaggcatgaacaaccagccaggacatgtggagaggagcatttttctttttttcttttttctttcttttttttttttttttttttttgagacgtctttctctgtcacccaggctggagtgcaatggcatgatctcggctcactgcaacccccacttccagggttcaagcaattcttctgccttagcctcccaagcagctaggattacaggcacccgccaccatgcccggttaatttttgtatttttagtagagacggagtttcaccatgttggcctcaaactcctgaccttaggtgatccacccgtctcggcctcccagagtgctgggattacaggtgagagcccccacgcccggccaggctcggctttctttccaggccccgtcacactcttagatgttccctgggccccagaaggcagcgtgaggtgctctgcccatctatgctgtccttttccaccccaccctatccactgggcccctggggctcccactccactccaggtctcttcatggacccttctttcccttcacttctgtcccaggagacctgggagactcatgggaacaggcatcatcttctccagcacagttcattgtctaatgcacgaaagtgctgggctgtgagaaggtcaggagcttacatggaatgggagtcagctgtggtacaaagtacgctgcttagttctactgattttttattttttatttttacataagactttgatggtaaaggaagcagtgtgtgagcaagctgactcctgtcttgtcaagtaccaggtccactctgatgagcccctgtggacagcactgctgtaactccccaagcctgggctcaggaggtgggccctaagcgctgttcccagctcttcctccatgctgtcagctcttccaccattcttcctggcgtcattctaaggtcctgtcttcccccgccctcttccttcctggcttctacgctcagctcaagtagtagctgtttgggtacttttcacccagacttaggaaatgttatcagttggtcgtattcctgtcagccctcttactatggaactcaaataggacagattcagctgaattcccagccctgtggttgcactctttgtctgccctgcttccccaaggtagcctgctccctaaaggtcaccgagatactccccatgcaaggtttttgttgtattacacatgacaacatggaataaagtgttttgcaaatttactggatgatatcctact

SEQ ID NO: 1108 - DNA, 4046 bp, Homo sapiens
actgaacctcaaaagataattttaggtaccatcctggtagctgtagagcagcaacagaccagtaaaagacttggttggtgttgcccttcttctgggtttgattacatgagtaattgtgtgaatagtctctaagttgtatgctctgagctttcgtttttagcttataaaagtgctactcttgggccagcatagtatcagaaattagctaattcatatggggcagtttaggctttaactaggaaatgatggttatcttaatgacaaaaaaggtactgacaaaagtccttttttgaacatgtgttcaaaagaaaaagagaaactatcaaactaataactgagtttgttgaacatcgagattgactgatctgagaggcttaaaactgattgccctgaaatagacttgcatgttttggatgatggctttgggtctcccagagcacttggtttcccttggtgctgattttttctctcaggattaaagcccctttatgtgatgttgttacagcagcttattgcaacttcattcagctgcttgaaaaagaagggagactgcctctaggttccatgtgttctttcagggatggtattttgatgttgcgtattctcttgaacatgtattcttccctgagaatttctgtgtgccgtggtagaagaaatacttgccagaaatcgccactcatggtatgcttttgtagtgtcgaagtgtcccctagaggtgacaaggcttgtgatagtgttgattctaacaagcatgaatctttcctttattttagcactgtgtgttacgtgccagtaatttgcagcttatcctttgtttctagctaggtaagctgggaaatagcctagtactttgtctatgtgtttatcttcaaaatgtcccaaatagccctgggaaaaaggtcgtgcagctcaatgggggctttcaacttacaattttctttgttttaggctccataaaaatacagactcaccagttcctgctttgatgtgacatgtgactccccagaatacaccttgcttctgtagaccagctccaacaggattccatggtagctgggatgttagggctcaggtaagtaaccttcctttttttttttttagtatatgtcctggtttggccatctgttttttttttttttaaaaaaaaaaaaaaaaggaaaagaggaaaaaaatatactactcttggacagtataaaagtaccccaaagactaaagacataactgtgccaaactgtgccatataataaaaaaaagtcacttccctgagccctgaaaggtcagtgtgtgtagggttacttggtcgccacagcgtgatctgggggcgggcgtcagattagagccggaactggtgatctgcaacttcagttcaccttgaagcaggtcagctgagctgagagcgcttgcactgagcccttttgcgctgctgctgttgccttagcggtcttcagcatgtgtttgctttggtttggggtaaatggcttagtggtcaacattagtgagcagtggtaatgcattttcagatatgggaactggtatgtggttggttccctagaaggacaccctcctgaaagctgtctcagaacaccgggggccatggctaatgtcatgtgcttgctacactcctcccatggtaactaaagagagtacccagatatacatctggttcttgggactctagaggaggatgagtactttgtaaaaacctgggggccccagtcattctaggtctgacactcaggtgctgtatcagctgcagtttgaactacttggcaccattgtgtggactttagttttgtaaaaatgaatggttccttaatttctcaaccttcaggctcaacatctcaagctgtttgttgttgttgttgttgttgttgttttgttttgtctttttgattagtggtcactccgcatttgatgttttgacatgtggatttcagaacttctgtgtggtaaagcagaatgttccaattgaattttcccattttttttcccctaagcaaaaatgtgagttttcacttatgcggccattgtgattccgactgagaccctaagtcgttctttgttgtctctctagtggtttctgacacctcagtgtgaagctgttgtagacatccataagaaatagcctgcttagggattatgtgagggcaaggtttggctgaaggagaatagaaggtgtggaaggaagcggaagaccagaagagcatcacactgcctcaagtcccaaatttgattctgctcctgatcctgtgactcaaattgtcattctcttttactgctgtggggtgtgctctgggcccagctgacaggacattctttgtactccacgtatttatgctggtgggagttgtatggctagtgctttgtgctttgtctcagaaattgtgtggactaaatgtaatatgggcagtgaatgggtttcttctggaagatgttaggcctggagggtggtttgggtttttacgagtctttttctcagattacagattacgaatggatgttataaaacaggcagtgttgacaccatacagtttctcctaagaaatgtacagagagttcaacctgaggaagctaattgaaaataaacttttaaaaagaaatgtagaaagaggaaatttaaaaagtatcttatgaatgggaaagatgtagccatttgagcttcaaagaacttttgagggaattctcaaaggacagtacccgtctttagtagataaatgcttgatatctatttttcttcttttactttttaaagaattactaaaataatacatggatttatagaaaaatcaaaccacttaaaaattgatcaggtggctgggcaaggtggctcatgcctgtaatcacagcgctttgggaggcctaggcgggtggatcacctgaagtcaggagttcgagaccagcctggctaacacggcgaaaccccatctctattaaaaatacaaaaattagctggccatggtggcttgagcgtgtagtcccagctactcggaaggctgaggcaggagaatcacttgaacctgggaggcggaggttgcagtgagccaagatcacaccactgcactcctgcctgggtgacagagtgagactcggtctcaaaaaaaaaaaaaaaaaaaagtatcaggtaaaaaaatgaaagctccccgcttaatctctgctcccactacccagaataactgctgttaatagcttaatgtagatccttctaagtcttctaagactaaactgtgtactttttgtgttgtaattaacaggagggtttttgttttgttttgttttttctttttttgagatggagtcttgctctgtcatccaggctggagtacagtggcacaatcttggctcactgcaacctccacctcctgggttcaagtgattctcctgcctcagcctcctgagtagctgggattacaggcgcctgccaccacacccagctaatttttgtatttttagtagagatgggtttcaccatgttggccaggctggtgtcgaactcctgacctcaggcgatccacctgccttggcctcccaaagtgctgggattacaggcgtgagccaccgtgcctggcctcaggatggtgttatatatacatattctgcatttttccatctcatatattcatctctgcctcatttcttttaaatagcagtgtagtccagggctgacttaccgtcatgcatttcgttgtctctctatgttattaaaaatgctacaggattgaaattcctcatgtgccagtcattttgaagaatggctgcctagacttggaatttctggtggataccaccacatcactgtccaaaatggctatcccagttcccacaacagtctgagaaagtgccattttcccatatcgtcccagaattggatatacatcttttaaattggtgccgcttggattattactgaggctaaacctcaataatcattgtcatagctcttaatgtattaaagatgttaactctttgtcatgcagatattttcctgttttgtcttacgtcttgattcttgtctttctgatatataaaatttatgttatgatttattc

SEQ ID NO: 1109 - DNA, 4053 bp, Homo sapiens
tagccgagtaatactattaacttgacttctgggatttcaaagtattctatgacttgactgtttaagggaattatgaggcctcactgaacctcaaaagataattttaggtaccatcctggtagctgtagagcagcaacagaccagtaaaagacttggttggtgttgcccttcttctgggtttgattacatgagtaattgtgtgaatagtctctaagttgtatgctctgagctttcgtttttagcttataaaagtgctactcttgggccagcatagtatcagaaattagctaattcatatggggcagtttaggctttaactaggaaatgatggttatcttaatgacaaaaaaggtactgacaaaagtccttttttgaacatgtgttcaaaagaaaaagagaaactatcaaactaataactgagtttgttgaacatcgagattgactgatctgagaggcttaaaactgattgccctgaaatagacttgcatgttttggatgatggctttgggtctcccagagcacttggtttcccttggtgctgattttttctctcaggattaaagcccctttatgtgatgttgttacagcagcttattgcaacttcattcagctgcttgaaaaagaagggagactgcctctaggttccatgtgttctttcagggatggtattttgatgttgcgtattctcttgaacatgtattcttccctgagaatttctgtgtgccgtggtagaagaaatacttgccagaaatcgccactcatggtatgcttttgtagtgtcgaagtgtcccctagaggtgacaaggcttgtgatagtgttgattctaacaagcatgaatctttcctttattttagcactgtgtgttacgtgccagtaatttgcagcttatcctttgtttctagctaggtaagctgggaaatagcctagtactttgtctatgtgtttatcttcaaaatgtcccaaatagccctgggaaaaaggtcgtgcagctcaatgggggctttcaacttacaattttctttgttttaggctccataaaaatacagactcaccagttcctgctttgatgtgacatgtgactccccagaatacaccttgcttctgtagaccagctccaacaggattccatggtagctgggatgttagggctcaggtaagtaaccttcctttttttttttttagtatatgtcctggtttggccatctgttttttttttttttaaaaaaaaaaaaaaaaggaaaagaggaaaaaaatatactactcttggacagtataaaagtaccccaaagactaaagacataactgtgccaaactgtgccatataataaaaaaaagtcacttccctgagccctgaaaggtcagtgtgtgtagggttacttggtcgccacagcgtgatctgggggcgggcgtcagattagagccggaactggtgatctgcaacttcagttcaccttgaagcaggtcagctgagctgagagcgcttgcactgagcccttttgcgctgctgctgttgccttagcggtcttcagcatgtgtttgctttggtttggggtaaatggcttagtggtcaacattagtgagcagtggtaatgcattttcagatatgggaactggtatgtggttggttccctagaaggacaccctcctgaaagctgtctcagaacaccgggggccatggctaatgtcatgtgcttgctacactcctcccatggtaactaaagagagtacccagatatacatctggttcttgggactctagaggaggatgagtactttgtaaaaacctgggggccccagtcattctaggtctgacactcaggtgctgtatcagctgcagtttgaactacttggcaccattgtgtggactttagttttgtaaaaatgaatggttccttaatttctcaaccttcaggctcaacatctcaagctgtttgttgttgttgttgttgttgttgttttgttttgtctttttgattagtggtcactccgcatttgatgttttgacatgtggatttcagaacttctgtgtggtaaagcagaatgttccaattgaattttcccattttttttcccctaagcaaaaatgtgagttttcacttatgcggccattgtgattccgactgagaccctaagtcgttctttgttgtctctctagtggtttctgacacctcagtgtgaagctgttgtagacatccataagaaatagcctgcttagggattatgtgagggcaaggtttggctgaaggagaatagaaggtgtggaaggaagcggaagaccagaagagcatcacactgcctcaagtcccaaatttgattctgctcctgatcctgtgactcaaattgtcattctcttttactgctgtggggtgtgctctgggcccagctgacaggacattctttgtactccacgtatttatgctggtgggagttgtatggctagtgctttgtgctttgtctcagaaattgtgtggactaaatgtaatatgggcagtgaatgggtttcttctggaagatgttaggcctggagggtggtttgggtttttacgagtctttttctcagattacagattacgaatggatgttataaaacaggcagtgttgacaccatacagtttctcctaagaaatgtacagagagttcaacctgaggaagctaattgaaaataaacttttaaaaagaaatgtagaaagaggaaatttaaaaagtatcttatgaatgggaaagatgtagccatttgagcttcaaagaacttttgagggaattctcaaaggacagtacccgtctttagtagataaatgcttgatatctatttttcttcttttactttttaaagaattactaaaataatacatggatttatagaaaaatcaaaccacttaaaaattgatcaggtggctgggcaaggtggctcatgcctgtaatcacagcgctttgggaggcctaggcgggtggatcacctgaagtcaggagttcgagaccagcctggctaacacggcgaaaccccatctctattaaaaatacaaaaattagctggccatggtggcttgagcgtgtagtcccagctactcggaaggctgaggcaggagaatcacttgaacctgggaggcggaggttgcagtgagccaagatcacaccactgcactcctgcctgggtgacagagtgagactcggtctcaaaaaaaaaaaaaaaaaaaagtatcaggtaaaaaaatgaaagctccccgcttaatctctgctcccactacccagaataactgctgttaatagcttaatgtagatccttctaagtcttctaagactaaactgtgtactttttgtgttgtaattaacaggagggtttttgttttgttttgttttttctttttttgagatggagtcttgctctgtcatccaggctggagtacagtggcacaatcttggctcactgcaacctccacctcctgggttcaagtgattctcctgcctcagcctcctgagtagctgggattacaggcgcctgccaccacacccagctaatttttgtatttttagtagagatgggtttcaccatgttggccaggctggtgtcgaactcctgacctcaggcgatccacctgccttggcctcccaaagtgctgggattacaggcgtgagccaccgtgcctggcctcaggatggtgttatatatacatattctgcatttttccatctcatatattcatctctgcctcatttcttttaaatagcagtgtagtccagggctgacttaccgtcatgcatttcgttgtctctctatgttattaaaaatgctacaggattgaaattcctcatgtgccagtcattttgaagaatggctgcctagacttggaatttctggtggataccaccacatcactgtccaaaatggctatcccagttcccacaacagtctgagaaagtgccattttcccatatcgtcccagaattggatatacatcttttaaattggtgccgcttggattattactgaggctaaacctcaataatcattgtcatagctcttaatgtattaaagatgttaactctttgtcatg

SEQ ID NO: 1110 - DNA, 4059 bp, Homo sapiens
tttttttttttttttagtcgagacggggtttcaccatcttggccacgctggtcttgaactcctgacctcgtgatccacccgcttcagcctcccaaagtgcagggattacaggcgtgagccaccgcacccagcctctggctcttttctttttgacatgaaatcttaagttaattatcttaaactttaagaactagaaggattcttagtccagcaccatcagtttacaaacaaaaaaaacttgtgtccctgagaagttgtgacttttccagggcctcctagccaggataccagtttggtttttattatatagctagccgagtaatactattaacttgacttctgggatttcaaagtattctatgacttgactgtttaagggaattatgaggcctcactgaacctcaaaagataattttaggtaccatcctggtagctgtagagcagcaacagaccagtaaaagacttggttggtgttgcccttcttctgggtttgattacatgagtaattgtgtgaatagtctctaagttgtatgctctgagctttcgtttttagcttataaaagtgctactcttgggccagcatagtatcagaaattagctaattcatatggggcagtttaggctttaactaggaaatgatggttatcttaatgacaaaaaaggtactgacaaaagtccttttttgaacatgtgttcaaaagaaaaagagaaactatcaaactaataactgagtttgttgaacatcgagattgactgatctgagaggcttaaaactgattgccctgaaatagacttgcatgttttggatgatggctttgggtctcccagagcacttggtttcccttggtgctgattttttctctcaggattaaagcccctttatgtgatgttgttacagcagcttattgcaacttcattcagctgcttgaaaaagaagggagactgcctctaggttccatgtgttctttcagggatggtattttgatgttgcgtattctcttgaacatgtattcttccctgagaatttctgtgtgccgtggtagaagaaatacttgccagaaatcgccactcatggtatgcttttgtagtgtcgaagtgtcccctagaggtgacaaggcttgtgatagtgttgattctaacaagcatgaatctttcctttattttagcactgtgtgttacgtgccagtaatttgcagcttatcctttgtttctagctaggtaagctgggaaatagcctagtactttgtctatgtgtttatcttcaaaatgtcccaaatagccctgggaaaaaggtcgtgcagctcaatgggggctttcaacttacaattttctttgttttaggctccataaaaatacagactcaccagttcctgctttgatgtgacatgtgactccccagaatacaccttgcttctgtagaccagctccaacaggattccatggtagctgggatgttagggctcaggtaagtaaccttcctttttttttttttagtatatgtcctggtttggccatctgttttttttttttttaaaaaaaaaaaaaaaaggaaaagaggaaaaaaatatactactcttggacagtataaaagtaccccaaagactaaagacataactgtgccaaactgtgccatataataaaaaaaagtcacttccctgagccctgaaaggtcagtgtgtgtagggttacttggtcgccacagcgtgatctgggggcgggcgtcagattagagccggaactggtgatctgcaacttcagttcaccttgaagcaggtcagctgagctgagagcgcttgcactgagcccttttgcgctgctgctgttgccttagcggtcttcagcatgtgtttgctttggtttggggtaaatggcttagtggtcaacattagtgagcagtggtaatgcattttcagatatgggaactggtatgtggttggttccctagaaggacaccctcctgaaagctgtctcagaacaccgggggccatggctaatgtcatgtgcttgctacactcctcccatggtaactaaagagagtacccagatatacatctggttcttgggactctagaggaggatgagtactttgtaaaaacctgggggccccagtcattctaggtctgacactcaggtgctgtatcagctgcagtttgaactacttggcaccattgtgtggactttagttttgtaaaaatgaatggttccttaatttctcaaccttcaggctcaacatctcaagctgtttgttgttgttgttgttgttgttgttttgttttgtctttttgattagtggtcactccgcatttgatgttttgacatgtggatttcagaacttctgtgtggtaaagcagaatgttccaattgaattttcccattttttttcccctaagcaaaaatgtgagttttcacttatgcggccattgtgattccgactgagaccctaagtcgttctttgttgtctctctagtggtttctgacacctcagtgtgaagctgttgtagacatccataagaaatagcctgcttagggattatgtgagggcaaggtttggctgaaggagaatagaaggtgtggaaggaagcggaagaccagaagagcatcacactgcctcaagtcccaaatttgattctgctcctgatcctgtgactcaaattgtcattctcttttactgctgtggggtgtgctctgggcccagctgacaggacattctttgtactccacgtatttatgctggtgggagttgtatggctagtgctttgtgctttgtctcagaaattgtgtggactaaatgtaatatgggcagtgaatgggtttcttctggaagatgttaggcctggagggtggtttgggtttttacgagtctttttctcagattacagattacgaatggatgttataaaacaggcagtgttgacaccatacagtttctcctaagaaatgtacagagagttcaacctgaggaagctaattgaaaataaacttttaaaaagaaatgtagaaagaggaaatttaaaaagtatcttatgaatgggaaagatgtagccatttgagcttcaaagaacttttgagggaattctcaaaggacagtacccgtctttagtagataaatgcttgatatctatttttcttcttttactttttaaagaattactaaaataatacatggatttatagaaaaatcaaaccacttaaaaattgatcaggtggctgggcaaggtggctcatgcctgtaatcacagcgctttgggaggcctaggcgggtggatcacctgaagtcaggagttcgagaccagcctggctaacacggcgaaaccccatctctattaaaaatacaaaaattagctggccatggtggcttgagcgtgtagtcccagctactcggaaggctgaggcaggagaatcacttgaacctgggaggcggaggttgcagtgagccaagatcacaccactgcactcctgcctgggtgacagagtgagactcggtctcaaaaaaaaaaaaaaaaaaaagtatcaggtaaaaaaatgaaagctccccgcttaatctctgctcccactacccagaataactgctgttaatagcttaatgtagatccttctaagtcttctaagactaaactgtgtactttttgtgttgtaattaacaggagggtttttgttttgttttgttttttctttttttgagatggagtcttgctctgtcatccaggctggagtacagtggcacaatcttggctcactgcaacctccacctcctgggttcaagtgattctcctgcctcagcctcctgagtagctgggattacaggcgcctgccaccacacccagctaatttttgtatttttagtagagatgggtttcaccatgttggccaggctggtgtcgaactcctgacctcaggcgatccacctgccttggcctcccaaagtgctgggattacaggcgtgagccaccgtgcctggcctcaggatggtgttatatatacatattctgcatttttccatctcatatattcatctctgcctcatttcttttaaatagcagtgtagtccagggctgactt

SEQ ID NO: 1111 - DNA, 4043 bp, Homo sapiens
tcccgggctcaagcagttctctgcctcagcctcccaagtagctgggattacaggcacctgccaccacgcctggctaatttttgtattttttttttttttttttttttttttttagtcgagacggggtttcaccatcttggccacgctggtcttgaactcctgacctcgtgatccacccgcttcagcctcccaaagtgcagggattacaggcgtgagccaccgcacccagcctctggctcttttctttttgacatgaaatcttaagttaattatcttaaactttaagaactagaaggattcttagtccagcaccatcagtttacaaacaaaaaaaacttgtgtccctgagaagttgtgacttttccagggcctcctagccaggataccagtttggtttttattatatagctagccgagtaatactattaacttgacttctgggatttcaaagtattctatgacttgactgtttaagggaattatgaggcctcactgaacctcaaaagataattttaggtaccatcctggtagctgtagagcagcaacagaccagtaaaagacttggttggtgttgcccttcttctgggtttgattacatgagtaattgtgtgaatagtctctaagttgtatgctctgagctttcgtttttagcttataaaagtgctactcttgggccagcatagtatcagaaattagctaattcatatggggcagtttaggctttaactaggaaatgatggttatcttaatgacaaaaaaggtactgacaaaagtccttttttgaacatgtgttcaaaagaaaaagagaaactatcaaactaataactgagtttgttgaacatcgagattgactgatctgagaggcttaaaactgattgccctgaaatagacttgcatgttttggatgatggctttgggtctcccagagcacttggtttcccttggtgctgattttttctctcaggattaaagcccctttatgtgatgttgttacagcagcttattgcaacttcattcagctgcttgaaaaagaagggagactgcctctaggttccatgtgttctttcagggatggtattttgatgttgcgtattctcttgaacatgtattcttccctgagaatttctgtgtgccgtggtagaagaaatacttgccagaaatcgccactcatggtatgcttttgtagtgtcgaagtgtcccctagaggtgacaaggcttgtgatagtgttgattctaacaagcatgaatctttcctttattttagcactgtgtgttacgtgccagtaatttgcagcttatcctttgtttctagctaggtaagctgggaaatagcctagtactttgtctatgtgtttatcttcaaaatgtcccaaatagccctgggaaaaaggtcgtgcagctcaatgggggctttcaacttacaattttctttgttttaggctccataaaaatacagactcaccagttcctgctttgatgtgacatgtgactccccagaatacaccttgcttctgtagaccagctccaacaggattccatggtagctgggatgttagggctcaggtaagtaaccttcctttttttttttttagtatatgtcctggtttggccatctgttttttttttttttaaaaaaaaaaaaaaaaggaaaagaggaaaaaaatatactactcttggacagtataaaagtaccccaaagactaaagacataactgtgccaaactgtgccatataataaaaaaaagtcacttccctgagccctgaaaggtcagtgtgtgtagggttacttggtcgccacagcgtgatctgggggcgggcgtcagattagagccggaactggtgatctgcaacttcagttcaccttgaagcaggtcagctgagctgagagcgcttgcactgagcccttttgcgctgctgctgttgccttagcggtcttcagcatgtgtttgctttggtttggggtaaatggcttagtggtcaacattagtgagcagtggtaatgcattttcagatatgggaactggtatgtggttggttccctagaaggacaccctcctgaaagctgtctcagaacaccgggggccatggctaatgtcatgtgcttgctacactcctcccatggtaactaaagagagtacccagatatacatctggttcttgggactctagaggaggatgagtactttgtaaaaacctgggggccccagtcattctaggtctgacactcaggtgctgtatcagctgcagtttgaactacttggcaccattgtgtggactttagttttgtaaaaatgaatggttccttaatttctcaaccttcaggctcaacatctcaagctgtttgttgttgttgttgttgttgttgttttgttttgtctttttgattagtggtcactccgcatttgatgttttgacatgtggatttcagaacttctgtgtggtaaagcagaatgttccaattgaattttcccattttttttcccctaagcaaaaatgtgagttttcacttatgcggccattgtgattccgactgagaccctaagtcgttctttgttgtctctctagtggtttctgacacctcagtgtgaagctgttgtagacatccataagaaatagcctgcttagggattatgtgagggcaaggtttggctgaaggagaatagaaggtgtggaaggaagcggaagaccagaagagcatcacactgcctcaagtcccaaatttgattctgctcctgatcctgtgactcaaattgtcattctcttttactgctgtggggtgtgctctgggcccagctgacaggacattctttgtactccacgtatttatgctggtgggagttgtatggctagtgctttgtgctttgtctcagaaattgtgtggactaaatgtaatatgggcagtgaatgggtttcttctggaagatgttaggcctggagggtggtttgggtttttacgagtctttttctcagattacagattacgaatggatgttataaaacaggcagtgttgacaccatacagtttctcctaagaaatgtacagagagttcaacctgaggaagctaattgaaaataaacttttaaaaagaaatgtagaaagaggaaatttaaaaagtatcttatgaatgggaaagatgtagccatttgagcttcaaagaacttttgagggaattctcaaaggacagtacccgtctttagtagataaatgcttgatatctatttttcttcttttactttttaaagaattactaaaataatacatggatttatagaaaaatcaaaccacttaaaaattgatcaggtggctgggcaaggtggctcatgcctgtaatcacagcgctttgggaggcctaggcgggtggatcacctgaagtcaggagttcgagaccagcctggctaacacggcgaaaccccatctctattaaaaatacaaaaattagctggccatggtggcttgagcgtgtagtcccagctactcggaaggctgaggcaggagaatcacttgaacctgggaggcggaggttgcagtgagccaagatcacaccactgcactcctgcctgggtgacagagtgagactcggtctcaaaaaaaaaaaaaaaaaaaagtatcaggtaaaaaaatgaaagctccccgcttaatctctgctcccactacccagaataactgctgttaatagcttaatgtagatccttctaagtcttctaagactaaactgtgtactttttgtgttgtaattaacaggagggtttttgttttgttttgttttttctttttttgagatggagtcttgctctgtcatccaggctggagtacagtggcacaatcttggctcactgcaacctccacctcctgggttcaagtgattctcctgcctcagcctcctgagtagctgggattacaggcgcctgccaccacacccagctaatttttgtatttttagtagagatgggtttcaccatgttggccaggctggtgtcgaactcctgacctcaggcgatccacctgccttggcctcccaaagtgctgggattacaggcgtgag

SEQ ID NO: 1112 - DNA, 4078 bp, Homo sapiens
ctcctctcggagagagggctgtggtaaaagccgtccggaaaatggccgccgccgccgccgccgcgccgagcggaggaggaggaggaggcgaggaggagagactgtgagtgggaccgccgtggccgcgggcggggacccttgccggggggcgggggtcaggggcgggacgtggcgcgggaggggcccgcggggtcggacgacacggctggcggatggcgtccctcctctctaccctccccctcccgccgccgccggtggcgactctcccctcggcccgtcacccgtgctcgcgggtgaccgtcctcggcgcggcctccctggagccgccttcgcctgacgcccctcttcctcccgccctcgacgcgcatcccggcccccggccccgcgggcgcccctgtcgccggggttcgcctgtcggggctgcgcgcgctcctgcccttctcggggctttgggccgcggcgccgtcgcgcgcccgcggccccggcctctccctggatcgcgctctccccctccctccctcgcgcgccccctctcccgttactcggcccccccaccggcgcgcgtgcgcacttcgcctcccgtcgggagagtgcgccacaagggctcctgagctctcacccccatctctgggctttgcctccccctccttctcgcccattccatgaatttctgccccccgctacccccccgcgagcgagtaggtccaccggctcctttccccatctagcaggaacaagtaggtggggattattatccacaaaagggactagacattgtgttctgggtcccacaactcatcataaagaggtggttatagttcccatcaggagccgtgggtaggggactgtgcgtccagcagcacccgaggctcttcggcgccagaggctctaaggtgcgagcgtgtccccagggtgctcagaggttctttggagtgctgtggcctcggaatgtgagcaccctcccatcctaccctccccttcgccggcgatcttccagttacataagtggagtgggacatagtaggtaacgggctctcatcgccctggagcgctcgggatcaccggtaccagatggggcaagttcatcgcgacgctgtggctcctgttaattgtgcctgaaaggttatcctctgttcagtttggtcatgaccgaatcacccaaactgaaactcagatgacttttatatggcagtggcaatgtttctgtggttttgcactaaagacttaaggtcattatgaagagtgtaaaaggattgctgtcgcaggggagaccgtttatgacattgctaagtatggaccccgagggggaaaaagctcattctggaattgctctgtggcggttgcttctgttgcgagtgtgttcgggtgtgggttggtcacagcagaaatgggctccaccacaaaattgatattcctgactcatggtcaggcagatgtgtgcttctggttatttttccaggaacaggaatgggctctgccgagcctttcacacgttgtgtctctgctgtgcgggatcagtaccccagactgtgagataacaggatcgaattcaggggttggttggtgatccaggaaccatacctacttggatgtgatactgagtggcctagacgttgtaggactctcataagttttagacattttgttatactgtaaaaatgaagcatatacggcctcagtagtaacattgcactaataggtaattattactctagagaattttgggttccatggctggaatgttcatcagtatctcagcaatttcagttaataaccagattaagctgacctcttgagtcttttgaaatctgctgggtccctataataagacagggtctggattttttaatcttttgggaatttccaccaaggatttagggaaataggcttttatgggcttttcaggatttctatttcaaatcccaatgaggaagtctaggaaacacttgcttttattttcttgcctgaatatgtcagaaccttaaatcacccaatcaatctagaagtactacagttgattaaagtaagtcaccacaggtcacccattcgtggcaggtcagctaggtggctgatcactggaatacagtcatatccccaggcatacacacgagcctcacttgacgatcccaaagtttgtacatctgagcttgagacgtgacaagttgaggtctctgctttgttcttcatagttggcagtttgtctcctcgggtgcccctccggttagctgtttatcatacgtctagccctatcaacagtgcaggcagcttccagagtatagttttctctgcaaagtgcctggtggaggggtacctccttttccattgtcctaatggctccactgggcttccataccagccctttccagtgtcttaacagctcaaagaaacccatctgtggctttcttgttagcactggcctatcacaccttcctattgcctgttaactaaaattttgcctggaatgctttaagcttagagtactgggtctttgtttcacccgattgataggagagtgtcatgcagtcagccgaactccgacttctgtgctgtttaaatccttaggtaggtctggggcaaggcacaaaccactgtgtattcaaagggttatggtgcttgcattctgtgtgtatatgtttgtaatttccaaccagagtcgtttcccgtgcctgccctgcctctgtgcaatctagtctagtagggtagggaggcaagctgtggagtttgaaaaaaaaaaaaaaagctagatgagtttaataggctgttaccccctccagaacattcctcccatgtggagatgaaacgagaagttcatttctttaacctaaaataaagaacaacagagataaaattgttagttccttattggagcctggtttccattgctaatgtacctgcttgggactctgcatgataaatgacgtgtcctggaacctgaaatcttttataaaggttaatatcagcagaaatcttttaattagctaagagcagcttgttctcaagctgcccgagttatcttggaggagagaatcacaggaaatgtttgatatttctagtaaccagtgttttcagtgcgtggggtaaagcacactcctagactggccagtcccaaagagtgtggcaggacacctgcttgttttccctgccctctgctatggtgacatccttgcagaccagtcttgcgtggctggcagacgcaatctttttttcttgggtagagcattatcaccgctgcgatggaaggaccttgtcctcggtgcctccataccagccctttccagtgaaactactgctgtcccggcaagcccctgtgcgtgtgcatcattccgggtaggacaagatgtgaacaggtccctcttctttgggcttaagtagaagttgtgctcttctgcttttacctgtgtgctcttctgcttttacctgttctcttctgcctttctcttgcaagaaacctgtcgaaagcttgctttgcatgccattgcttaaatactttgatggtatgtatggtatgtgggataactgagtgggagccggaattggggggtgggcagggcatccccacccccacccccacatcaaagggggaatgaccatttcgttagagaataaagcctgagtcttataacttcttcaagcacatgtatgctgggtctcctggcgtgtgaatgtgttcccgctgtgctgtgtggctgttttgcagttactgtagacactgtagtctgggctctcattattgcctctgaagttgacaggaccaagccttagtaaggatgcacttgtcttcctagcccaagagctaggggtgttttatatatatattaactttcttttttagatttcataaactgctctcattttctcttttctttctttctttttttttttttttttttgagacagtctcactctgtcacccatgctggagtgcagtggcacgatctcagctcactgcaacctctgcctcccgggctcaagcagttctctgcctcagcctcccaagtagctgggattacaggcacctgccaccacgcctggctaatttttgtattttttttttttttttttttttttttttagtcga

SEQ ID NO: 1113 - DNA, 4044 bp, Homo sapiens
caagccgcctcttttccccaaacgacggccgaaagcagccaatcaacagctggaggggtccgcccccttttccctggccgaaatggacaggaaatctcgccaattgacggcatcgccgctgagacctcccccctcccccgtcctccccgtcccagcccggccatcacagccaatgacgggcgggctcgcagcggcgccgagggcggggcgcgggcgcgcaggtgcagcagcgcgcgggccggccaagagggcggggcgcgacgtcggccgtgcggggtcccggcgtcggcggcgcgcgcgctccctcctctcggagagagggctgtggtaaaagccgtccggaaaatggccgccgccgccgccgccgcgccgagcggaggaggaggaggaggcgaggaggagagactgtgagtgggaccgccgtggccgcgggcggggacccttgccggggggcgggggtcaggggcgggacgtggcgcgggaggggcccgcggggtcggacgacacggctggcggatggcgtccctcctctctaccctccccctcccgccgccgccggtggcgactctcccctcggcccgtcacccgtgctcgcgggtgaccgtcctcggcgcggcctccctggagccgccttcgcctgacgcccctcttcctcccgccctcgacgcgcatcccggcccccggccccgcgggcgcccctgtcgccggggttcgcctgtcggggctgcgcgcgctcctgcccttctcggggctttgggccgcggcgccgtcgcgcgcccgcggccccggcctctccctggatcgcgctctccccctccctccctcgcgcgccccctctcccgttactcggcccccccaccggcgcgcgtgcgcacttcgcctcccgtcgggagagtgcgccacaagggctcctgagctctcacccccatctctgggctttgcctccccctccttctcgcccattccatgaatttctgccccccgctacccccccgcgagcgagtaggtccaccggctcctttccccatctagcaggaacaagtaggtggggattattatccacaaaagggactagacattgtgttctgggtcccacaactcatcataaagaggtggttatagttcccatcaggagccgtgggtaggggactgtgcgtccagcagcacccgaggctcttcggcgccagaggctctaaggtgcgagcgtgtccccagggtgctcagaggttctttggagtgctgtggcctcggaatgtgagcaccctcccatcctaccctccccttcgccggcgatcttccagttacataagtggagtgggacatagtaggtaacgggctctcatcgccctggagcgctcgggatcaccggtaccagatggggcaagttcatcgcgacgctgtggctcctgttaattgtgcctgaaaggttatcctctgttcagtttggtcatgaccgaatcacccaaactgaaactcagatgacttttatatggcagtggcaatgtttctgtggttttgcactaaagacttaaggtcattatgaagagtgtaaaaggattgctgtcgcaggggagaccgtttatgacattgctaagtatggaccccgagggggaaaaagctcattctggaattgctctgtggcggttgcttctgttgcgagtgtgttcgggtgtgggttggtcacagcagaaatgggctccaccacaaaattgatattcctgactcatggtcaggcagatgtgtgcttctggttatttttccaggaacaggaatgggctctgccgagcctttcacacgttgtgtctctgctgtgcgggatcagtaccccagactgtgagataacaggatcgaattcaggggttggttggtgatccaggaaccatacctacttggatgtgatactgagtggcctagacgttgtaggactctcataagttttagacattttgttatactgtaaaaatgaagcatatacggcctcagtagtaacattgcactaataggtaattattactctagagaattttgggttccatggctggaatgttcatcagtatctcagcaatttcagttaataaccagattaagctgacctcttgagtcttttgaaatctgctgggtccctataataagacagggtctggattttttaatcttttgggaatttccaccaaggatttagggaaataggcttttatgggcttttcaggatttctatttcaaatcccaatgaggaagtctaggaaacacttgcttttattttcttgcctgaatatgtcagaaccttaaatcacccaatcaatctagaagtactacagttgattaaagtaagtcaccacaggtcacccattcgtggcaggtcagctaggtggctgatcactggaatacagtcatatccccaggcatacacacgagcctcacttgacgatcccaaagtttgtacatctgagcttgagacgtgacaagttgaggtctctgctttgttcttcatagttggcagtttgtctcctcgggtgcccctccggttagctgtttatcatacgtctagccctatcaacagtgcaggcagcttccagagtatagttttctctgcaaagtgcctggtggaggggtacctccttttccattgtcctaatggctccactgggcttccataccagccctttccagtgtcttaacagctcaaagaaacccatctgtggctttcttgttagcactggcctatcacaccttcctattgcctgttaactaaaattttgcctggaatgctttaagcttagagtactgggtctttgtttcacccgattgataggagagtgtcatgcagtcagccgaactccgacttctgtgctgtttaaatccttaggtaggtctggggcaaggcacaaaccactgtgtattcaaagggttatggtgcttgcattctgtgtgtatatgtttgtaatttccaaccagagtcgtttcccgtgcctgccctgcctctgtgcaatctagtctagtagggtagggaggcaagctgtggagtttgaaaaaaaaaaaaaaagctagatgagtttaataggctgttaccccctccagaacattcctcccatgtggagatgaaacgagaagttcatttctttaacctaaaataaagaacaacagagataaaattgttagttccttattggagcctggtttccattgctaatgtacctgcttgggactctgcatgataaatgacgtgtcctggaacctgaaatcttttataaaggttaatatcagcagaaatcttttaattagctaagagcagcttgttctcaagctgcccgagttatcttggaggagagaatcacaggaaatgtttgatatttctagtaaccagtgttttcagtgcgtggggtaaagcacactcctagactggccagtcccaaagagtgtggcaggacacctgcttgttttccctgccctctgctatggtgacatccttgcagaccagtcttgcgtggctggcagacgcaatctttttttcttgggtagagcattatcaccgctgcgatggaaggaccttgtcctcggtgcctccataccagccctttccagtgaaactactgctgtcccggcaagcccctgtgcgtgtgcatcattccgggtaggacaagatgtgaacaggtccctcttctttgggcttaagtagaagttgtgctcttctgcttttacctgtgtgctcttctgcttttacctgttctcttctgcctttctcttgcaagaaacctgtcgaaagcttgctttgcatgccattgcttaaatactttgatggtatgtatggtatgtgggataactgagtgggagccggaattggggggtgggcagggcatccccacccccacccccacatcaaagggggaatgaccatttcgttagagaataaagcctgagtcttataacttcttcaagcacatgtatgctgggtctcctggcgtgtgaatgtgttcccgctgtgctgtgtggctgttttgcagttactgtagacactgtagtctgggctctcattattgcctctga

SEQ ID NO: 1114 - DNA, 4063 bp, Homo sapiens
caacactgacttcctcgttagtccccaacatgccaggcatagtctctcctcatgtcctttgaacttgcctggaatgttctttccccagatattcatatgagggagtaaaatgagggtgaaaaccagcagatatctaaatagcacccccttcacttagtttatctttctcaaagcccttatcactatgtgaaatgatatattatacttatttgtatgctagtatgaatcttcccggcaagaatgttagtttgctgtctgttcagtaccgtgcatccagagcctggaagagtgcctggcacatagcaggtagtcaataaatgaatgggggcaagcagccaaatcagaatcaggttttcttgctaagcatagaactaacagaaggatcattgaatggattggataatgactggcatcagggtaaggtccccttaacaaacactcctgtcctgaacacctggttagctaacagttttctcatactcttattttcccaaaacacaattgctggatctcagctccaaatcaactcttctaggaaagtgaaaaattgctggatctcagctcccaaatcatatcttccaggcagagctaacattgccccttattcacacctccaccaaaccatctgatccaacagtgacaggtgtcacgaggccttggcatgcactctcttcccccgccagagttctgcgaaagccagggttgcgatttgttgtcagtttattccccgcctctatgagagtgtgagcactgggcaggctcggatgaaataatgcattgagtaggcctctgaaaccaaggcccctcagctggggcaacgtcaggctccagggtgggcaactttgctgcttctgccgaagatagtgatattgagaaaatgtgggtgcaatgaaacgcttattgcagcgcactcggtgcatctgtggacagagggtcaatcgcccctcagagcagcgcaaacaggcgtcccaagcctaggccttcacttgccccagcatccgcaagggtccattaatccttaacattcaaattccgcccactaaaccagtccctccgcgcccaagccgcctcttttccccaaacgacggccgaaagcagccaatcaacagctggaggggtccgcccccttttccctggccgaaatggacaggaaatctcgccaattgacggcatcgccgctgagacctcccccctcccccgtcctccccgtcccagcccggccatcacagccaatgacgggcgggctcgcagcggcgccgagggcggggcgcgggcgcgcaggtgcagcagcgcgcgggccggccaagagggcggggcgcgacgtcggccgtgcggggtcccggcgtcggcggcgcgcgcgctccctcctctcggagagagggctgtggtaaaagccgtccggaaaatggccgccgccgccgccgccgcgccgagcggaggaggaggaggaggcgaggaggagagactgtgagtgggaccgccgtggccgcgggcggggacccttgccggggggcgggggtcaggggcgggacgtggcgcgggaggggcccgcggggtcggacgacacggctggcggatggcgtccctcctctctaccctccccctcccgccgccgccggtggcgactctcccctcggcccgtcacccgtgctcgcgggtgaccgtcctcggcgcggcctccctggagccgccttcgcctgacgcccctcttcctcccgccctcgacgcgcatcccggcccccggccccgcgggcgcccctgtcgccggggttcgcctgtcggggctgcgcgcgctcctgcccttctcggggctttgggccgcggcgccgtcgcgcgcccgcggccccggcctctccctggatcgcgctctccccctccctccctcgcgcgccccctctcccgttactcggcccccccaccggcgcgcgtgcgcacttcgcctcccgtcgggagagtgcgccacaagggctcctgagctctcacccccatctctgggctttgcctccccctccttctcgcccattccatgaatttctgccccccgctacccccccgcgagcgagtaggtccaccggctcctttccccatctagcaggaacaagtaggtggggattattatccacaaaagggactagacattgtgttctgggtcccacaactcatcataaagaggtggttatagttcccatcaggagccgtgggtaggggactgtgcgtccagcagcacccgaggctcttcggcgccagaggctctaaggtgcgagcgtgtccccagggtgctcagaggttctttggagtgctgtggcctcggaatgtgagcaccctcccatcctaccctccccttcgccggcgatcttccagttacataagtggagtgggacatagtaggtaacgggctctcatcgccctggagcgctcgggatcaccggtaccagatggggcaagttcatcgcgacgctgtggctcctgttaattgtgcctgaaaggttatcctctgttcagtttggtcatgaccgaatcacccaaactgaaactcagatgacttttatatggcagtggcaatgtttctgtggttttgcactaaagacttaaggtcattatgaagagtgtaaaaggattgctgtcgcaggggagaccgtttatgacattgctaagtatggaccccgagggggaaaaagctcattctggaattgctctgtggcggttgcttctgttgcgagtgtgttcgggtgtgggttggtcacagcagaaatgggctccaccacaaaattgatattcctgactcatggtcaggcagatgtgtgcttctggttatttttccaggaacaggaatgggctctgccgagcctttcacacgttgtgtctctgctgtgcgggatcagtaccccagactgtgagataacaggatcgaattcaggggttggttggtgatccaggaaccatacctacttggatgtgatactgagtggcctagacgttgtaggactctcataagttttagacattttgttatactgtaaaaatgaagcatatacggcctcagtagtaacattgcactaataggtaattattactctagagaattttgggttccatggctggaatgttcatcagtatctcagcaatttcagttaataaccagattaagctgacctcttgagtcttttgaaatctgctgggtccctataataagacagggtctggattttttaatcttttgggaatttccaccaaggatttagggaaataggcttttatgggcttttcaggatttctatttcaaatcccaatgaggaagtctaggaaacacttgcttttattttcttgcctgaatatgtcagaaccttaaatcacccaatcaatctagaagtactacagttgattaaagtaagtcaccacaggtcacccattcgtggcaggtcagctaggtggctgatcactggaatacagtcatatccccaggcatacacacgagcctcacttgacgatcccaaagtttgtacatctgagcttgagacgtgacaagttgaggtctctgctttgttcttcatagttggcagtttgtctcctcgggtgcccctccggttagctgtttatcatacgtctagccctatcaacagtgcaggcagcttccagagtatagttttctctgcaaagtgcctggtggaggggtacctccttttccattgtcctaatggctccactgggcttccataccagccctttccagtgtcttaacagctcaaagaaacccatctgtggctttcttgttagcactggcctatcacaccttcctattgcctgttaactaaaattttgcctggaatgctttaagcttagagtactgggtctttgtttcacccgattgataggagagtgtcatgcagtcagccgaactccgacttctgtgctgtttaaatccttaggtaggtctggggcaaggcacaaaccactgtgtattcaaagggttatggtgcttgcattctgtgtgtatatgtttgtaatttccaaccagagtcgtttcccgtgcctgccctgcctctgtgcaatctagtctagtagg

SEQ ID NO: 1115 - DNA, 46 bp, Homo sapiens
tctgcatggcgatgggagcagcccaggcatctgcagccagacctgc

SEQ ID NO: 1116 - DNA, 58 bp, Homo sapiens
gggactgaagctcgggcaactcggagagcccacttgaagacaaattacaaacacacag

SEQ ID NO: 1117 - DNA, 42 bp, Homo sapiens
cgggcaggtaggccagggtgccccgcactgtctgtgtccggg

SEQ ID NO: 1118 - DNA, 81 bp, Homo sapiens
aaggctgaattccttcctccttgtctcgaatcttccctggggggcaggggacacctaccttggtagaagaaggggctggag

SEQ ID NO: 1119 - DNA, 45 bp, Homo sapiens
ccgagctcaggccctgaatgggtctgggagcctggaaaagcttca

SEQ ID NO: 1120 - DNA, 46 bp, Homo sapiens
accaaacccaaacagaaaaaccccagaaagacaagtaaagggcaaa

SEQ ID NO: 1121 - DNA, 45 bp, Homo sapiens
aaggggactgggggagtcaggccaccccagtggactccagctccc

SEQ ID NO: 1122 - DNA, 50 bp, Homo sapiens
gggaggggtagacctggggggagctcgacgacatacagtattgtcaggag

SEQ ID NO: 1123 - DNA, 52 bp, Homo sapiens
atcttcataatgttcaagtacagacaaaattgaaattgaggtcacaccccaa

SEQ ID NO: 1124 - DNA, 46 bp, Homo sapiens
gttgctcttacttacttgatcaaatacacatcatacttcccagcag

SEQ ID NO: 1125 - DNA, 42 bp, Homo sapiens
cagccttcaggcagggtggggtcatcatacatgggtccccgg

SEQ ID NO: 1126 - DNA, 63 bp, Homo sapiens
gtttatattacccaaaataaaattcaaactaaaagtaacaaaaccttattacacttaatgcaa

SEQ ID NO: 1127 - DNA, 42 bp, Homo sapiens
cacagttcacaagaggagggaagaccaatggagtcccagggg

SEQ ID NO: 1128 - DNA, 45 bp, Homo sapiens
aacagtggacatggcatttgtctatttggtcttctgatctacctt

SEQ ID NO: 1129 - DNA, 47 bp, Homo sapiens
aaggaagagggcgggggaagacaggaccttagaatgacgccaggaag

SEQ ID NO: 1130 - DNA, 51 bp, Homo sapiens
agggaaagaagggtccatgaagagacctggagtggagtgggagccccaggg

SEQ ID NO: 1131 - DNA, 64 bp, Homo sapiens
acataaaggggctttaatcctgagagaaaaaatcagcaccaagggaaaccaagtgctctgggag

SEQ ID NO: 1132 - DNA, 4046 bp, Homo sapiens
gcctccaaaagtgctggtattataggcatgagccacctcgcccagctgagggttcctaagcagtggttcttcaaatagtacctgggatggaaaattcctgctggggcttcctatttcctgaaagcacagagtggggcaggcaccctcgggctaaaggaggtgctactgtcaggaggcgagggaaggagtgggccagggtcttgctaagggaggcatgtggggccggctgggcttctagaggtcgccagagccagtggcctgcccggctgccccacgccctcagcgcagtcgggacagacactctgctctttggggctgacacggatgcgcctgagcaccccagaggccagcctgggcggcagcacctgggagggagctggacgacagcagctgcaggctgtccagggccccatcctcgtacagggccagcttctggaccatcttctgtcgggcagggttgatgataatctgcggtggctctgacgacgatgatgcagagctgccaagggccagtcctggggtggagatggcactcccttagcctcatgctgtggctccccagcccgcagcctagcaccctgcctccctggcctcaggcctgaattcctcagagaagtccaagggcagggcccagctctcaggctaccagacagagccctccttgttcccagccttcaggaatggggtggggggagggctggagagcaagctccacctgggaaggatgtggcctggggaggggaaaccagggttgctaaggtcacagtgagctgaacatttggccctggttctcttctagaaggctggggtggggacttacaggggctttggcccaaagaggccttggtccctctcctgggaacccgtctccccagctaccttccacggctgtgggccgggatcctgggccactcccccagctcgattctcctgccgtgtccccctgaggacagccggcctccctgaggggtgctgggtccagagggcagcttggagtcaagtgccaggagcgcagggcagcagagaggccgcctaggctctcgtcactctccacgggctggttggggcctctctgcagctgctctgctgcctgggcactggctcctgatggcgctgccaggggctgccatggagcagccccactgtgggctctgccagtgctggacacgtaggagttctcctgcggggaaggggggatgcagctggcggcctccgaatgcccgggcacccccgccaccactgcctgcagcttctctagcctctcgtacacctgcaagtggaaaagagggactctcagggtgagatggcagccctggccggtcaccccgtgggcaaaccacagggctgctccaggccgtccgtgacctgccccagggctctaaaatgacataccctgcagctgggaacgctctgcccctcgcccctctgttcccatcacagggagtgctgagaagcgcggctgccaaaagcaaggactgagaatggcctcgttcttttctacaaaatgaatctcactgccccgctgccctcaaacggggcctctccattttcaactgtcaccagaggagaagaggtggggtactagggaggggacagaaaaaggcagatgcagtagtgcagtgcgcccagcagggggcgcggcagcagctctttccttctctctatgtgaagggggtcggagctgggctccgcaaagcaggactgcccggggcccctcagttcagaggggcgctgccccaaacagaaccaaagggcaagcaagaaatgtgtggagactccagagagacctagcaggtgctgagatggggtcactacagagcaaggcctggaatgcgggctttctatctggccaccccgtcccagtgcgcagctggctacctgggtcataggaggcctccttttggcccggcggtgcaggcagcagcaggccagctggcccaggcccaggcccagctcaggtgggcagggcccgggcctggggtccaggtgcttcttgtagatctgcatggcgatgggagcagcccaggcatctgcagccagacctgcttgcagtgtgctctgggtgcttctcaaagccactccagcctcctcagcctcctcttccaccaggtctttctgtgggataaatactgtcagtatggctaccaggtggccacacctgcagctgcagtcctcaggtccttgtcactcaatcgtatgggttttgataaaaaaaaaaaaaaaaaaaaaagagatggggtctcgctttgttggcctggctggtctccaagtaggctcaagtgatcctcccgcctcagcctcccaaagtgctggtgttacaggtgtgagacactgtgccacagctcttggtctttctacaacttactttttttctgagacagggactcattctgtcacccaggctggagtgcagtggtgcaatcatggctcagtgcagcctcaacctcccaggctcgtgatcctcccacctcggcctcccgagcagctgggattacaggtgtgtaccaccatgcctatcttgctatgttgcccaggctggtctccaactcccaggctcaagcgatcctcctgcctcagattcccgagtagcttctagagatttattaaacacctactgtgggccagtggtgctctgggccctagggatacaggaacaaacagaaccctgggacccggtttgacagagctgacttcctggtgggggagagccccatggagctggggtctgaaggcaggaagtagcctgagagggcagagccgagaaggaaagcgccccacagagaggtgccccacagacaaagaggtaccccagagagagaggcgccccgcagagaggcgcccccagggtggaaacaggaccggaggccatctccagttctgaaatcagacagaccaggaggaaccacctgggtgggcggtggcttttctcgcagagcgaacggcacatactaaggctgtgaagcaggcagcagggagcgccccgagtcccagggacctggggcgttggggggtcaaccacataagggactgggccttcaccccaagagcagagaaaaggcaaaggggcctttgaaaagagcactttggctgcagggtggggagcaagtggggaagtccaaggacccccaaggagcctggtgcgcttcttcagcaggatgcatggatggacggacggggaagggaaaggaaggagggctcaagcccggctcctgggttctcagcggggctgaatcctgacggagaccccacagcacacaggaaccgccccaaacaagaggagaagcagtgaagcaattactggctgagcacattctgtgaagtctgttttgcatatgggaaaacaggcccacaggggagcaggaatttgctggaaggccactgtcaggctggggctaaaacccaggtctctagtctcctggccccaccacagtccacggtgaggcagactgagtggagtaagaccgtgaggcagctcaggctgccctgcacggtgcggagagctcagctgcagcctgctggggcccaggaggttcctcggggcctgcttcttctctaccaccgcctttctccggccagagtcctctgagttccactgcagcttgggtctcagtgccctgggaccgcccttccccctgcccccagcccaggtggggtctgtacaaggcccatagtgtctgcaggacagacaggtttgtcctcggcaaggtaaacgaagttgtttggagccctgcctactttcaaaaatgaggccactgtggcagcagaggcatccatgggcactgcgccccagttatccccgccactggggctgtgcctgctggctgccagcagctgtgtgtccctcctggccctgcctcaaggggctcaccagatacttggtcctggcaccgtgcgtcttcacagccctctgaccagccaaggtctctagcactacctggagagagggaagagggagagcatggcagtggccttggcagggaagaggcctctggtgtggacatggattgggcctgacaagggtgtggacaaaggcagagccagatgtt

SEQ ID NO: 1133 - DNA, 4058 bp, Homo sapiens
gcagtgtgctctgggtgcttctcaaagccactccagcctcctcagcctcctcttccaccaggtctttctgtgggataaatactgtcagtatggctaccaggtggccacacctgcagctgcagtcctcaggtccttgtcactcaatcgtatgggttttgataaaaaaaaaaaaaaaaaaaaaagagatggggtctcgctttgttggcctggctggtctccaagtaggctcaagtgatcctcccgcctcagcctcccaaagtgctggtgttacaggtgtgagacactgtgccacagctcttggtctttctacaacttactttttttctgagacagggactcattctgtcacccaggctggagtgcagtggtgcaatcatggctcagtgcagcctcaacctcccaggctcgtgatcctcccacctcggcctcccgagcagctgggattacaggtgtgtaccaccatgcctatcttgctatgttgcccaggctggtctccaactcccaggctcaagcgatcctcctgcctcagattcccgagtagcttctagagatttattaaacacctactgtgggccagtggtgctctgggccctagggatacaggaacaaacagaaccctgggacccggtttgacagagctgacttcctggtgggggagagccccatggagctggggtctgaaggcaggaagtagcctgagagggcagagccgagaaggaaagcgccccacagagaggtgccccacagacaaagaggtaccccagagagagaggcgccccgcagagaggcgcccccagggtggaaacaggaccggaggccatctccagttctgaaatcagacagaccaggaggaaccacctgggtgggcggtggcttttctcgcagagcgaacggcacatactaaggctgtgaagcaggcagcagggagcgccccgagtcccagggacctggggcgttggggggtcaaccacataagggactgggccttcaccccaagagcagagaaaaggcaaaggggcctttgaaaagagcactttggctgcagggtggggagcaagtggggaagtccaaggacccccaaggagcctggtgcgcttcttcagcaggatgcatggatggacggacggggaagggaaaggaaggagggctcaagcccggctcctgggttctcagcggggctgaatcctgacggagaccccacagcacacaggaaccgccccaaacaagaggagaagcagtgaagcaattactggctgagcacattctgtgaagtctgttttgcatatgggaaaacaggcccacaggggagcaggaatttgctggaaggccactgtcaggctggggctaaaacccaggtctctagtctcctggccccaccacagtccacggtgaggcagactgagtggagtaagaccgtgaggcagctcaggctgccctgcacggtgcggagagctcagctgcagcctgctggggcccaggaggttcctcggggcctgcttcttctctaccaccgcctttctccggccagagtcctctgagttccactgcagcttgggtctcagtgccctgggaccgcccttccccctgcccccagcccaggtggggtctgtacaaggcccatagtgtctgcaggacagacaggtttgtcctcggcaaggtaaacgaagttgtttggagccctgcctactttcaaaaatgaggccactgtggcagcagaggcatccatgggcactgcgccccagttatccccgccactggggctgtgcctgctggctgccagcagctgtgtgtccctcctggccctgcctcaaggggctcaccagatacttggtcctggcaccgtgcgtcttcacagccctctgaccagccaaggtctctagcactacctggagagagggaagagggagagcatggcagtggccttggcagggaagaggcctctggtgtggacatggattgggcctgacaagggtgtggacaaaggcagagccagatgttatgggactgaagctcgggcaactcggagagcccacttgaagacaaattacaaacacacagttaggtgcagggtgaggaggagggcctcggagggagggggaccctggagctgcagcctcctggggtcttggcagatggcccctggcccgcagtgcactctgcagcccccacctctgcctgcctgtggcttctcctcctctgagccagcagaggggtcagtggctcaccaccccaaagctgaaggtgtccgtgtccacagccagccttcccgtcttgatgtactcctcgggcaggtaggccagggtgccccgcactgtctgtgtccgggccaccatgctgctctggctggggctggacccggcaaagcggctgaaccgggccaggccaaagtctcccagcttgggtgtcagcctctcatccagaaggacgttggaacttggggagagaagacagtggcgtcagcccggtcctagctcctacacctgcccggcttagataaggctggactcgaggctgccagcccggtgccttgcccacagaaagcgctggcactgccctgagcgctccagctgcctgggggcctctgctcatcagtagggcccatccttggcccgttcccacacctgtgcgatgccggggtgttgaggtcccaggccatgcctgatccccacattgataggacgcggggccccccttgctgcaggccctgccccggcagttctcaagggcccctcctcacctcttgatgtctccatggatgaggctggggctgtcctgatgtagaaactgaattgcccgggctgtacccagaaggatgtccagtcgctgaggccaggagagaggtgggcaggcctgggtctggggtggcaaagggggacaggggaggttgctggatggccgttccttgatcccaaccatccttctacctgtcaccgtgcagcctggaacagccacttcactctctaggcctcagtttcccccttctggaaaacgaggagcaaagtctccgtgacctgcacttcttaagcaatggctggggacacgttcaatagaatctgctgggcttcggctcccagggctcatccctttgtccctggtggtcgggaagtccttgaaggcattcttcccgctctccccaaacgcagcatgcaggaggaggcaagggggccctccctcagctgtaggtggtccagctggtagccccagaccccctcgcctccggggcttgctgatgagaccctccagctacgctgcttgcaaaggggagaggcctgggaaagagctctatagaaaacattgggtcgggccaggcgtggtggctcacgcctgtaatcccagcactttgggaggctgaggcgcgcagaccacctggggtcaggagttcgagactagcctggccaatgtggcaaaacctcatctctactaaaaatacaaaaattaggcaggtgtggtggtgcatgcctgtagtcccagctactcgggaggctgcggcaggaggatcgcctgaacccgggaggtggaggttgtggtgagctgagatcacaccactgcactccagcctggatgacagagcaagactccacctcaaaaaaaaaaaaaaaaaaaaaaaaaaaaaaattgaccccaccgtgggccaaatcctgagccgggtgctgctggggagctggaagtgcaggcctggcctgctggcaggacccactcacacaggctgaaagccctaggccccgcgcccggctccagccaggtgtcaggagtgctttgggtcctgggaagcgtgccgggccaggtgagcctacctggcagtggagacggtcctccagggagccgttgggcaggaagccgtacaccaggcagtagaagccgttctgagcacagtagccagcaaagtccacaatgtttgggtgacgaaacctgtttgaaaaaggggagcactttccatcaggccagactgggtgggcagccctggctggggcctcagctcgcccgggcctgccaggcctcaggtgcccaagggagccaggtcctgtggtgtgcggtctgaagccccacgggacctggtg

SEQ ID NO: 1134 - DNA, 4042 bp, Homo sapiens
tgtgccacagctcttggtctttctacaacttactttttttctgagacagggactcattctgtcacccaggctggagtgcagtggtgcaatcatggctcagtgcagcctcaacctcccaggctcgtgatcctcccacctcggcctcccgagcagctgggattacaggtgtgtaccaccatgcctatcttgctatgttgcccaggctggtctccaactcccaggctcaagcgatcctcctgcctcagattcccgagtagcttctagagatttattaaacacctactgtgggccagtggtgctctgggccctagggatacaggaacaaacagaaccctgggacccggtttgacagagctgacttcctggtgggggagagccccatggagctggggtctgaaggcaggaagtagcctgagagggcagagccgagaaggaaagcgccccacagagaggtgccccacagacaaagaggtaccccagagagagaggcgccccgcagagaggcgcccccagggtggaaacaggaccggaggccatctccagttctgaaatcagacagaccaggaggaaccacctgggtgggcggtggcttttctcgcagagcgaacggcacatactaaggctgtgaagcaggcagcagggagcgccccgagtcccagggacctggggcgttggggggtcaaccacataagggactgggccttcaccccaagagcagagaaaaggcaaaggggcctttgaaaagagcactttggctgcagggtggggagcaagtggggaagtccaaggacccccaaggagcctggtgcgcttcttcagcaggatgcatggatggacggacggggaagggaaaggaaggagggctcaagcccggctcctgggttctcagcggggctgaatcctgacggagaccccacagcacacaggaaccgccccaaacaagaggagaagcagtgaagcaattactggctgagcacattctgtgaagtctgttttgcatatgggaaaacaggcccacaggggagcaggaatttgctggaaggccactgtcaggctggggctaaaacccaggtctctagtctcctggccccaccacagtccacggtgaggcagactgagtggagtaagaccgtgaggcagctcaggctgccctgcacggtgcggagagctcagctgcagcctgctggggcccaggaggttcctcggggcctgcttcttctctaccaccgcctttctccggccagagtcctctgagttccactgcagcttgggtctcagtgccctgggaccgcccttccccctgcccccagcccaggtggggtctgtacaaggcccatagtgtctgcaggacagacaggtttgtcctcggcaaggtaaacgaagttgtttggagccctgcctactttcaaaaatgaggccactgtggcagcagaggcatccatgggcactgcgccccagttatccccgccactggggctgtgcctgctggctgccagcagctgtgtgtccctcctggccctgcctcaaggggctcaccagatacttggtcctggcaccgtgcgtcttcacagccctctgaccagccaaggtctctagcactacctggagagagggaagagggagagcatggcagtggccttggcagggaagaggcctctggtgtggacatggattgggcctgacaagggtgtggacaaaggcagagccagatgttatgggactgaagctcgggcaactcggagagcccacttgaagacaaattacaaacacacagttaggtgcagggtgaggaggagggcctcggagggagggggaccctggagctgcagcctcctggggtcttggcagatggcccctggcccgcagtgcactctgcagcccccacctctgcctgcctgtggcttctcctcctctgagccagcagaggggtcagtggctcaccaccccaaagctgaaggtgtccgtgtccacagccagccttcccgtcttgatgtactcctcgggcaggtaggccagggtgccccgcactgtctgtgtccgggccaccatgctgctctggctggggctggacccggcaaagcggctgaaccgggccaggccaaagtctcccagcttgggtgtcagcctctcatccagaaggacgttggaacttggggagagaagacagtggcgtcagcccggtcctagctcctacacctgcccggcttagataaggctggactcgaggctgccagcccggtgccttgcccacagaaagcgctggcactgccctgagcgctccagctgcctgggggcctctgctcatcagtagggcccatccttggcccgttcccacacctgtgcgatgccggggtgttgaggtcccaggccatgcctgatccccacattgataggacgcggggccccccttgctgcaggccctgccccggcagttctcaagggcccctcctcacctcttgatgtctccatggatgaggctggggctgtcctgatgtagaaactgaattgcccgggctgtacccagaaggatgtccagtcgctgaggccaggagagaggtgggcaggcctgggtctggggtggcaaagggggacaggggaggttgctggatggccgttccttgatcccaaccatccttctacctgtcaccgtgcagcctggaacagccacttcactctctaggcctcagtttcccccttctggaaaacgaggagcaaagtctccgtgacctgcacttcttaagcaatggctggggacacgttcaatagaatctgctgggcttcggctcccagggctcatccctttgtccctggtggtcgggaagtccttgaaggcattcttcccgctctccccaaacgcagcatgcaggaggaggcaagggggccctccctcagctgtaggtggtccagctggtagccccagaccccctcgcctccggggcttgctgatgagaccctccagctacgctgcttgcaaaggggagaggcctgggaaagagctctatagaaaacattgggtcgggccaggcgtggtggctcacgcctgtaatcccagcactttgggaggctgaggcgcgcagaccacctggggtcaggagttcgagactagcctggccaatgtggcaaaacctcatctctactaaaaatacaaaaattaggcaggtgtggtggtgcatgcctgtagtcccagctactcgggaggctgcggcaggaggatcgcctgaacccgggaggtggaggttgtggtgagctgagatcacaccactgcactccagcctggatgacagagcaagactccacctcaaaaaaaaaaaaaaaaaaaaaaaaaaaaaaattgaccccaccgtgggccaaatcctgagccgggtgctgctggggagctggaagtgcaggcctggcctgctggcaggacccactcacacaggctgaaagccctaggccccgcgcccggctccagccaggtgtcaggagtgctttgggtcctgggaagcgtgccgggccaggtgagcctacctggcagtggagacggtcctccagggagccgttgggcaggaagccgtacaccaggcagtagaagccgttctgagcacagtagccagcaaagtccacaatgtttgggtgacgaaacctgtttgaaaaaggggagcactttccatcaggccagactgggtgggcagccctggctggggcctcagctcgcccgggcctgccaggcctcaggtgcccaagggagccaggtcctgtggtgtgcggtctgaagccccacgggacctggtgtggctccccctctggcctcacctggacagctgctccacctcggtcaggaagctctgcttcactgcagtccactccaggtcagcgttctgcagcccccagggtgcggtgggggaaggggcagggaagacgggcagcgtgaggctctcgaagcgaaggccttcgggccaccagtgccacctacccgaggcccagaaccaccaaggggccagggaccctacgccagaatgagggctgaaggagttgtgtggggaagcgagggggaaaggct

SEQ ID NO: 1135 - DNA, 4081 bp, Homo sapiens
tgccccggcagttctcaagggcccctcctcacctcttgatgtctccatggatgaggctggggctgtcctgatgtagaaactgaattgcccgggctgtacccagaaggatgtccagtcgctgaggccaggagagaggtgggcaggcctgggtctggggtggcaaagggggacaggggaggttgctggatggccgttccttgatcccaaccatccttctacctgtcaccgtgcagcctggaacagccacttcactctctaggcctcagtttcccccttctggaaaacgaggagcaaagtctccgtgacctgcacttcttaagcaatggctggggacacgttcaatagaatctgctgggcttcggctcccagggctcatccctttgtccctggtggtcgggaagtccttgaaggcattcttcccgctctccccaaacgcagcatgcaggaggaggcaagggggccctccctcagctgtaggtggtccagctggtagccccagaccccctcgcctccggggcttgctgatgagaccctccagctacgctgcttgcaaaggggagaggcctgggaaagagctctatagaaaacattgggtcgggccaggcgtggtggctcacgcctgtaatcccagcactttgggaggctgaggcgcgcagaccacctggggtcaggagttcgagactagcctggccaatgtggcaaaacctcatctctactaaaaatacaaaaattaggcaggtgtggtggtgcatgcctgtagtcccagctactcgggaggctgcggcaggaggatcgcctgaacccgggaggtggaggttgtggtgagctgagatcacaccactgcactccagcctggatgacagagcaagactccacctcaaaaaaaaaaaaaaaaaaaaaaaaaaaaaaattgaccccaccgtgggccaaatcctgagccgggtgctgctggggagctggaagtgcaggcctggcctgctggcaggacccactcacacaggctgaaagccctaggccccgcgcccggctccagccaggtgtcaggagtgctttgggtcctgggaagcgtgccgggccaggtgagcctacctggcagtggagacggtcctccagggagccgttgggcaggaagccgtacaccaggcagtagaagccgttctgagcacagtagccagcaaagtccacaatgtttgggtgacgaaacctgtttgaaaaaggggagcactttccatcaggccagactgggtgggcagccctggctggggcctcagctcgcccgggcctgccaggcctcaggtgcccaagggagccaggtcctgtggtgtgcggtctgaagccccacgggacctggtgtggctccccctctggcctcacctggacagctgctccacctcggtcaggaagctctgcttcactgcagtccactccaggtcagcgttctgcagcccccagggtgcggtgggggaaggggcagggaagacgggcagcgtgaggctctcgaagcgaaggccttcgggccaccagtgccacctacccgaggcccagaaccaccaaggggccagggaccctacgccagaatgagggctgaaggagttgtgtggggaagcgagggggaaaggctggagaagtggtgagggttatctgatggccttccagggtccctgccagggtgcgacactcacctccttcagcctcttcacagcatacaccgtgttcctcatcaccgcccggtacacgcacccaaagccaccctccccgatcttgagctcctccgagaagttgtgggtgccccgggaaatctcacagaggggccagcaaaacggaaaggggcgggctccctgcaggagggacactgagctctctgggcctggctgtgggaagagagcctggatcaggtggggtccctgtctcttcccttctgcccaaggctccaggctctccccaccacagctgcctcccagctgacccagcttggctgactggggctctgcgctacatcaaaggctgaattccttcctccttgtctcgaatcttccctggggggcaggggacacctaccttggtagaagaaggggctggagatggcggtggaggccacagggaagcagggcttgggaccaggccgagctcaggccctgaatgggtctgggagcctggaaaagcttcataaagacaccagtgagaggcaggcagagaccagcagcagggtctacagccgtggccgtggtcaaggtgggctcttctttgggtccaccgagcctaacaaccgggccctcttacctggggagaggaaggtggaggctgaggatggcaacttccgggggctccaggcctcggcctcggcgggtgcagggatgctgctgggcctcggggcagtggtgcctggggacggaagcggggcgggagggtgccctgggacgccaaggaaggaaaggaaggttgaggcccgggtgggggagccccgtggggcccgccggcctcccagccgtggggtgcccggagtcccgcgctcacaggctgtgatgatgtcccgcgcacggagcagctgcaggtgcgtgaggatgtgcacgaggtcggccacacgggcgttgcggttgatccagggccacaggacgctggccgtgcgctgcccggagcgctcgcacagccgcagctcggtctggtcgcgcacgatcagggcggctgcggggcggggggcgtcaggcgtcggcgccaggagcccgcgcgcctcccgccccccggcagcccgccgccacccaccgaactggcaccagtcggcgggctccagggcgtccatcactttgtagaagcggcacatgacccagggcggcacctcgtacaagaagtgctgggcgccgggggctgcgggctcccccgggcccggccccccggccatggctgccgccgccgggccgggacctgccggggcctctcagggccgcggcgggcgcgggcctgggccggccgggtccgcggacactgactcacttccccttcgagccggcctcgtgcgacgcccggcggggcggaaggggcggtgcccgggcccgccgccatcttgcgcgccgcggccgcgcgctgggtcacacgggggcgccccgcgccggggagggcccgggtcccggcgggttccgcgagcggcgatcggcctcccgggctcgcccgggcggggctctggaggacgaacggcggctcccggcgttggggacagagggcagggcggaggcccgggctgctcggaaaggggccggggccgggccttccgaaagctcctgggcggccctgccggaaccctgctctccactgcggcctgcagggctgttaccaggagccctgcctgcccgccccacgtctagccccctgcacacggcagcagccttgagccattcagtctccttaggtgtcctgaaatatgccgagaacgctgcccgccacagccgtgagtgtatgcgttgctgctgccccagccctcatttggcaagggtgagctcaggcagctgtggtgaaggcttcctgagcccgccggcagagctcctgccaccccgtacctgtcccctcctgggcatcgtccttgattacttgtctggaccgccacccccggtccccgccctgagatggggaagaccccacaagcagcaacgcagacttactcttttgtttctccagctggatgtctcctccagcgacagttccccttgccctcttgatcctgacagcgaaggggttccccacccctagccctacagacttaggacttttcctagaaacgagaagtgcccaaggcccacagctggcccctgttggagtctctttcctgaagccaccaccactgtggccactcccaaggaagatgccaaccataccatgaaacccatggcttctcacgggacagactttactgagatgtaccaactcaagtatctgaaatgactgcacacccatgctaacctccacgggggcacttggtcctacttacacacaaaggcccatcagctcacggaacagggctggcatacgagatgctcaatgcatacaagttgacttttcaaccctgggatctacctttgaaggccaggccttc

SEQ ID NO: 1136 - DNA, 4045 bp, Homo sapiens
ggccaggagagaggtgggcaggcctgggtctggggtggcaaagggggacaggggaggttgctggatggccgttccttgatcccaaccatccttctacctgtcaccgtgcagcctggaacagccacttcactctctaggcctcagtttcccccttctggaaaacgaggagcaaagtctccgtgacctgcacttcttaagcaatggctggggacacgttcaatagaatctgctgggcttcggctcccagggctcatccctttgtccctggtggtcgggaagtccttgaaggcattcttcccgctctccccaaacgcagcatgcaggaggaggcaagggggccctccctcagctgtaggtggtccagctggtagccccagaccccctcgcctccggggcttgctgatgagaccctccagctacgctgcttgcaaaggggagaggcctgggaaagagctctatagaaaacattgggtcgggccaggcgtggtggctcacgcctgtaatcccagcactttgggaggctgaggcgcgcagaccacctggggtcaggagttcgagactagcctggccaatgtggcaaaacctcatctctactaaaaatacaaaaattaggcaggtgtggtggtgcatgcctgtagtcccagctactcgggaggctgcggcaggaggatcgcctgaacccgggaggtggaggttgtggtgagctgagatcacaccactgcactccagcctggatgacagagcaagactccacctcaaaaaaaaaaaaaaaaaaaaaaaaaaaaaaattgaccccaccgtgggccaaatcctgagccgggtgctgctggggagctggaagtgcaggcctggcctgctggcaggacccactcacacaggctgaaagccctaggccccgcgcccggctccagccaggtgtcaggagtgctttgggtcctgggaagcgtgccgggccaggtgagcctacctggcagtggagacggtcctccagggagccgttgggcaggaagccgtacaccaggcagtagaagccgttctgagcacagtagccagcaaagtccacaatgtttgggtgacgaaacctgtttgaaaaaggggagcactttccatcaggccagactgggtgggcagccctggctggggcctcagctcgcccgggcctgccaggcctcaggtgcccaagggagccaggtcctgtggtgtgcggtctgaagccccacgggacctggtgtggctccccctctggcctcacctggacagctgctccacctcggtcaggaagctctgcttcactgcagtccactccaggtcagcgttctgcagcccccagggtgcggtgggggaaggggcagggaagacgggcagcgtgaggctctcgaagcgaaggccttcgggccaccagtgccacctacccgaggcccagaaccaccaaggggccagggaccctacgccagaatgagggctgaaggagttgtgtggggaagcgagggggaaaggctggagaagtggtgagggttatctgatggccttccagggtccctgccagggtgcgacactcacctccttcagcctcttcacagcatacaccgtgttcctcatcaccgcccggtacacgcacccaaagccaccctccccgatcttgagctcctccgagaagttgtgggtgccccgggaaatctcacagaggggccagcaaaacggaaaggggcgggctccctgcaggagggacactgagctctctgggcctggctgtgggaagagagcctggatcaggtggggtccctgtctcttcccttctgcccaaggctccaggctctccccaccacagctgcctcccagctgacccagcttggctgactggggctctgcgctacatcaaaggctgaattccttcctccttgtctcgaatcttccctggggggcaggggacacctaccttggtagaagaaggggctggagatggcggtggaggccacagggaagcagggcttgggaccaggccgagctcaggccctgaatgggtctgggagcctggaaaagcttcataaagacaccagtgagaggcaggcagagaccagcagcagggtctacagccgtggccgtggtcaaggtgggctcttctttgggtccaccgagcctaacaaccgggccctcttacctggggagaggaaggtggaggctgaggatggcaacttccgggggctccaggcctcggcctcggcgggtgcagggatgctgctgggcctcggggcagtggtgcctggggacggaagcggggcgggagggtgccctgggacgccaaggaaggaaaggaaggttgaggcccgggtgggggagccccgtggggcccgccggcctcccagccgtggggtgcccggagtcccgcgctcacaggctgtgatgatgtcccgcgcacggagcagctgcaggtgcgtgaggatgtgcacgaggtcggccacacgggcgttgcggttgatccagggccacaggacgctggccgtgcgctgcccggagcgctcgcacagccgcagctcggtctggtcgcgcacgatcagggcggctgcggggcggggggcgtcaggcgtcggcgccaggagcccgcgcgcctcccgccccccggcagcccgccgccacccaccgaactggcaccagtcggcgggctccagggcgtccatcactttgtagaagcggcacatgacccagggcggcacctcgtacaagaagtgctgggcgccgggggctgcgggctcccccgggcccggccccccggccatggctgccgccgccgggccgggacctgccggggcctctcagggccgcggcgggcgcgggcctgggccggccgggtccgcggacactgactcacttccccttcgagccggcctcgtgcgacgcccggcggggcggaaggggcggtgcccgggcccgccgccatcttgcgcgccgcggccgcgcgctgggtcacacgggggcgccccgcgccggggagggcccgggtcccggcgggttccgcgagcggcgatcggcctcccgggctcgcccgggcggggctctggaggacgaacggcggctcccggcgttggggacagagggcagggcggaggcccgggctgctcggaaaggggccggggccgggccttccgaaagctcctgggcggccctgccggaaccctgctctccactgcggcctgcagggctgttaccaggagccctgcctgcccgccccacgtctagccccctgcacacggcagcagccttgagccattcagtctccttaggtgtcctgaaatatgccgagaacgctgcccgccacagccgtgagtgtatgcgttgctgctgccccagccctcatttggcaagggtgagctcaggcagctgtggtgaaggcttcctgagcccgccggcagagctcctgccaccccgtacctgtcccctcctgggcatcgtccttgattacttgtctggaccgccacccccggtccccgccctgagatggggaagaccccacaagcagcaacgcagacttactcttttgtttctccagctggatgtctcctccagcgacagttccccttgccctcttgatcctgacagcgaaggggttccccacccctagccctacagacttaggacttttcctagaaacgagaagtgcccaaggcccacagctggcccctgttggagtctctttcctgaagccaccaccactgtggccactcccaaggaagatgccaaccataccatgaaacccatggcttctcacgggacagactttactgagatgtaccaactcaagtatctgaaatgactgcacacccatgctaacctccacgggggcacttggtcctacttacacacaaaggcccatcagctcacggaacagggctggcatacgagatgctcaatgcatacaagttgacttttcaaccctgggatctacctttgaaggccaggccttccgagggtaccttctagcatgtgcatgtgaagctggactcctttgagcagttgtctcctccagccccttaccaacctggtgaggctg

SEQ ID NO: 1137 - DNA, 4046 bp, Homo sapiens
tgccaggcccttcccgtcacacgctggagcagtgtgcctggagagcactggcttggaagaagctgaggggccagcgaggccagcatatggaggaggcttcccttggccgctcgtggcaggcctgaaggcagctacctgtgtccagggacagccagatccaatgaggaaacgcagcaccatgctgtcatgtgagctggagggggacttctgtcttataatgaaagcccagaccttgagtcactttcacagagagatttatcgagaatgctaacagcacaggatacagtacttcccaacaaaaggtgcaaacgcgtcacttagaaaggcatgctgagtattctttgctttcacatgtattaaaaaacttacaaaaataaaataaaactgcgtgctgcccatcttttccaatagtaaaagaaccttatgaaaaaatcacttgatttttacaacaaaagacacaaacggacatttttatgtaaatttataaggcaaactctttatataataaataggttacagggattcagtggggggggggtgtttttgaaacgtatacaggtacattcagacaggtttactgaaatggtacaaatttccttaataaattgccttttgtttttaaatatatcagtgctttcagtcatttggctatacacaaagaaccttttttctgaacactacaaaaaagcaatcaataatttttgtttttaaaacgacctacttattttctaaagtaattgtcccaaaacacaaaaactgaaggtgaatacgatacagggcttttagagacatctccagctaagtgtgtcccggcctctccctgtgccccaagtgcacctctcccaacctcagacaggtttccaggctggagccagctcccttctgcacagggtggcctgtgttactggcaatgctgtccatagctctcggcctctgggctggcacaggggagcatgacttcaactcaggagggggcagacaccctgcctagctcttccagatgctgcacccggcatgcaatggtcactacagtcagcactctccgcctctcagaggagggaggggctgtcaggtgttttgggagcccaaaaccatgcctaatgagggtaatggcttttctaaggagatgttttcgccatggaatgggaaggggttttctcacatctaagttttgctggcgatcgggtgacagccaagagagtgcaagccccctccatggtcattttattgccctgggaaggggagggtggggaatagagatgtcacagtgttgagccctggaggatggggtgggatgtgacggaagtgtcttaaacagtaatgcccacggggcacaccttggagagagaatgcccaccacctggcctgtccaggaagagctgcatctgccaacattagcctgacctgtgcccacagcagagcgtcccagcctcctgcttgggtgggcccagccccattctccccagctcttcagctctgcacacacacatcccctcctggctcccctcaaggaaacatcaatcttgcctttccttaaaagcacgggatggtggtaataatctcggggggaggggaagcaaaacaagaatccactgggcggaacaaaacctggttttgcagtgacttggaaagtggcaacacatcagctattcggcttgctggcttggagtgggactcctgggctccactgctttgggtggcttctggctgatctgggcaggggtcatctgttcagctctcccctctcatctcagtcaccatccccctccctccgaatgcttttgtttgtaaagaaaaagtgtctagaaatatttgtctctggaacaattactttaaacatagttacaatacagacttcagttcaaacacagaagagatttacttagcaaaattcctttcacccaccaaaaattacacaaatataagcctcaacaccacagttaagaggaccagtagagagaacctcatgtttggaacacaaaaggagaaataaaaaccaaaccaaacccaaacagaaaaaccccagaaagacaagtaaagggcaaagaaggaaggggaaggggagcaaacacagcacacgttacagtgtccagatacacgggagcccagcatgggcaagggctcggcacacattgagtaacagtcctggtgatatttggtcatatattcattgactactgactctggagcggctgttattgattgaagcagtgacaaatcaaacggaaaggaggccgtggtagcaagggaaggagcaggcttcaagttctgcaagccttttgcactccactgtccagctccccagaaacactgaaccgggtgggccccgctccatccgggcagggctagaggtcaccgggtgaggctaactcgggcgtcgatttcatgtcagtcagaaaacacgcacgtggacgcacgcagacacccacctgttcacggccaaacatcagcggcaacggcctcctcgcctcctctgcccctatcccaggctgggtgggaaagagcatcatgacccactgctaacactgaacacacgccggagctggccccggatgtgggcccagaggctgccccagccctggtcctccgaagggctcacgggtagcccggccactgaaagggcctatggctgtttttcttttggattcaggcctcagaagaagcaatgacagcagggagggaagcttttggccctggtgattataatgctctctgctttggaagaacaagtttctggatttttttggtgtttctaattattaaaaaaagatgatcaaaaagaactgttacagctaaactctctagcagatattgctcattaagaattacaaaagcaaatgcaattactcgtaggatgggggagaagaaagggacatttctggagtcttcactactcctggaggggaccccttggactgacgcacatgattctggggtccctggcgttctacctggtgcagctcacaggttccgagacaggccaggcctcccgtctccgctccagcccccaggctcgacagagtgggaaggatgaaacacactcggaccctactggcagggaggcctgcgaggctgactccacatgggctcaccctgaccaggtcacgggaaggggactgggggagtcaggccaccccagtggactccagctcccagaggtggaaggcgaccaggctgtgccgactacgttccggacttcagcaggtcaagggagcgctcctgcacccagaaccttgggacctctttcacaagcacgggagaaacaagagtgcaaaacctgggtgctgcctggagcctccttcacctggcacaggaaagcccttgaaagaagcgaggaaaagaccacgaatctgcttggacagaagaagtgaccagcagacagatttgtcgtttttttttcttttttttctttttttattttcccttgtcctatgctatggttatcagaaatattgtaattaagcaacaggtataattttaacaggtctttttttgtgtgtgtggagccacaagcaaaatgagtttataattgtgcaatatacagatatatatataaaaattcaactgctttgtgtgtctagtcggtgcgttaaataaaagggacagaaaaactaaaagcaaaactaaaaagcaaaacaaaagcccaggatagaggagacaaagcaggcctatgcgcacagtctatgtgttactggatataatcagggtcaccaggaagaacagctttgccacttgacacacaaacactgcggggagaggggctatcagtgggcaggagccaaacctcttggccttttcacctcatctgctctcactgctgagcaggacctgattaaaggtaggacagaatgggggtttgggggcaaagagatttccaaattccccaaatgttcttgaattcaaaggtaggatttcctccagggtctgggctctgcctgtgcacaagtcggagcccggagcgggagctgggggttgtgctccctccttgcactgccctcacacctgcttccttctgcctcctgacagggcaggcagggggccttggg

SEQ ID NO: 1138 - DNA, 4045 bp, Homo sapiens
atggcttttctaaggagatgttttcgccatggaatgggaaggggttttctcacatctaagttttgctggcgatcgggtgacagccaagagagtgcaagccccctccatggtcattttattgccctgggaaggggagggtggggaatagagatgtcacagtgttgagccctggaggatggggtgggatgtgacggaagtgtcttaaacagtaatgcccacggggcacaccttggagagagaatgcccaccacctggcctgtccaggaagagctgcatctgccaacattagcctgacctgtgcccacagcagagcgtcccagcctcctgcttgggtgggcccagccccattctccccagctcttcagctctgcacacacacatcccctcctggctcccctcaaggaaacatcaatcttgcctttccttaaaagcacgggatggtggtaataatctcggggggaggggaagcaaaacaagaatccactgggcggaacaaaacctggttttgcagtgacttggaaagtggcaacacatcagctattcggcttgctggcttggagtgggactcctgggctccactgctttgggtggcttctggctgatctgggcaggggtcatctgttcagctctcccctctcatctcagtcaccatccccctccctccgaatgcttttgtttgtaaagaaaaagtgtctagaaatatttgtctctggaacaattactttaaacatagttacaatacagacttcagttcaaacacagaagagatttacttagcaaaattcctttcacccaccaaaaattacacaaatataagcctcaacaccacagttaagaggaccagtagagagaacctcatgtttggaacacaaaaggagaaataaaaaccaaaccaaacccaaacagaaaaaccccagaaagacaagtaaagggcaaagaaggaaggggaaggggagcaaacacagcacacgttacagtgtccagatacacgggagcccagcatgggcaagggctcggcacacattgagtaacagtcctggtgatatttggtcatatattcattgactactgactctggagcggctgttattgattgaagcagtgacaaatcaaacggaaaggaggccgtggtagcaagggaaggagcaggcttcaagttctgcaagccttttgcactccactgtccagctccccagaaacactgaaccgggtgggccccgctccatccgggcagggctagaggtcaccgggtgaggctaactcgggcgtcgatttcatgtcagtcagaaaacacgcacgtggacgcacgcagacacccacctgttcacggccaaacatcagcggcaacggcctcctcgcctcctctgcccctatcccaggctgggtgggaaagagcatcatgacccactgctaacactgaacacacgccggagctggccccggatgtgggcccagaggctgccccagccctggtcctccgaagggctcacgggtagcccggccactgaaagggcctatggctgtttttcttttggattcaggcctcagaagaagcaatgacagcagggagggaagcttttggccctggtgattataatgctctctgctttggaagaacaagtttctggatttttttggtgtttctaattattaaaaaaagatgatcaaaaagaactgttacagctaaactctctagcagatattgctcattaagaattacaaaagcaaatgcaattactcgtaggatgggggagaagaaagggacatttctggagtcttcactactcctggaggggaccccttggactgacgcacatgattctggggtccctggcgttctacctggtgcagctcacaggttccgagacaggccaggcctcccgtctccgctccagcccccaggctcgacagagtgggaaggatgaaacacactcggaccctactggcagggaggcctgcgaggctgactccacatgggctcaccctgaccaggtcacgggaaggggactgggggagtcaggccaccccagtggactccagctcccagaggtggaaggcgaccaggctgtgccgactacgttccggacttcagcaggtcaagggagcgctcctgcacccagaaccttgggacctctttcacaagcacgggagaaacaagagtgcaaaacctgggtgctgcctggagcctccttcacctggcacaggaaagcccttgaaagaagcgaggaaaagaccacgaatctgcttggacagaagaagtgaccagcagacagatttgtcgtttttttttcttttttttctttttttattttcccttgtcctatgctatggttatcagaaatattgtaattaagcaacaggtataattttaacaggtctttttttgtgtgtgtggagccacaagcaaaatgagtttataattgtgcaatatacagatatatatataaaaattcaactgctttgtgtgtctagtcggtgcgttaaataaaagggacagaaaaactaaaagcaaaactaaaaagcaaaacaaaagcccaggatagaggagacaaagcaggcctatgcgcacagtctatgtgttactggatataatcagggtcaccaggaagaacagctttgccacttgacacacaaacactgcggggagaggggctatcagtgggcaggagccaaacctcttggccttttcacctcatctgctctcactgctgagcaggacctgattaaaggtaggacagaatgggggtttgggggcaaagagatttccaaattccccaaatgttcttgaattcaaaggtaggatttcctccagggtctgggctctgcctgtgcacaagtcggagcccggagcgggagctgggggttgtgctccctccttgcactgccctcacacctgcttccttctgcctcctgacagggcaggcagggggccttggggaggcagtgagaggccagctcagaaggctcagctgatccgaggcgagcagagcaggagtgggcaaggcaggctgcccctcaggcagaagtgccttcctagttccctgggtgttttcctgacacgtcagcgctggggcaggctctgtcaagatgagaagagtgggaaggagggtggtgctgggccttccaggtcactggtgaacgctccaccttccataccactcccaaaagacaggttcagaagccatgtcctcaggtcggctacctccagattccccttgcctgtaatgctcaccaggcatctcaggccaagtgctaagtatttttagatcagcactgttgtaaaagcttgctcgtattcattcaaaaacatcgaaatgtaattttctgccaaatgttttctaggttttccttctaaattgttgagaactgacttcagtgttcagcttttcccctctaatatgtaattttagaccctgggggaggcagtatcctaacgatttataacaagtagactatgccttttctaaagattgatacaatatctaaaagagaaagacaccaaaatggagagaatcaacaaatcccgtcagagcagagagaagagtaggaagacccggagggagcagggctctgcccccccaccgggcaggtcctccagacccactccatggtaggaactctagaaacagctgactccctgaagtctaggacacaggtcctagaatctgcaggtgtgaacttgaaacaggaatccatttggggcaatgacacaggctaaaaatgtatatgcccaaagatcttcttaaagaactggtacctgtaacctcccctggcccagtcagcccagagagcctgactggaatgctctggaaaaggagctgtggttagacgggggacacagagttctggctgtcaggctccacttgggctaaaccaattccagatggtcccgcgcaggggactccgctcgtatccctctgctccctcctgggcttgagccgcttactaagtgatttaaaattcagagattctgtcagctaaagaaactcctttctccacccaacttggcagtttgtgtctggttattaccctctttcgccatcac

SEQ ID NO: 1139 - DNA, 4050 bp, Homo sapiens
ttgtgcaatatacagatatatatataaaaattcaactgctttgtgtgtctagtcggtgcgttaaataaaagggacagaaaaactaaaagcaaaactaaaaagcaaaacaaaagcccaggatagaggagacaaagcaggcctatgcgcacagtctatgtgttactggatataatcagggtcaccaggaagaacagctttgccacttgacacacaaacactgcggggagaggggctatcagtgggcaggagccaaacctcttggccttttcacctcatctgctctcactgctgagcaggacctgattaaaggtaggacagaatgggggtttgggggcaaagagatttccaaattccccaaatgttcttgaattcaaaggtaggatttcctccagggtctgggctctgcctgtgcacaagtcggagcccggagcgggagctgggggttgtgctccctccttgcactgccctcacacctgcttccttctgcctcctgacagggcaggcagggggccttggggaggcagtgagaggccagctcagaaggctcagctgatccgaggcgagcagagcaggagtgggcaaggcaggctgcccctcaggcagaagtgccttcctagttccctgggtgttttcctgacacgtcagcgctggggcaggctctgtcaagatgagaagagtgggaaggagggtggtgctgggccttccaggtcactggtgaacgctccaccttccataccactcccaaaagacaggttcagaagccatgtcctcaggtcggctacctccagattccccttgcctgtaatgctcaccaggcatctcaggccaagtgctaagtatttttagatcagcactgttgtaaaagcttgctcgtattcattcaaaaacatcgaaatgtaattttctgccaaatgttttctaggttttccttctaaattgttgagaactgacttcagtgttcagcttttcccctctaatatgtaattttagaccctgggggaggcagtatcctaacgatttataacaagtagactatgccttttctaaagattgatacaatatctaaaagagaaagacaccaaaatggagagaatcaacaaatcccgtcagagcagagagaagagtaggaagacccggagggagcagggctctgcccccccaccgggcaggtcctccagacccactccatggtaggaactctagaaacagctgactccctgaagtctaggacacaggtcctagaatctgcaggtgtgaacttgaaacaggaatccatttggggcaatgacacaggctaaaaatgtatatgcccaaagatcttcttaaagaactggtacctgtaacctcccctggcccagtcagcccagagagcctgactggaatgctctggaaaaggagctgtggttagacgggggacacagagttctggctgtcaggctccacttgggctaaaccaattccagatggtcccgcgcaggggactccgctcgtatccctctgctccctcctgggcttgagccgcttactaagtgatttaaaattcagagattctgtcagctaaagaaactcctttctccacccaacttggcagtttgtgtctggttattaccctctttcgccatcactgtcacagcaatgaaaagctgggcagagaagcaggtgacaatttggggctgctccctgtcccaggtgcactgttcatgcttcgggcctggaatgatgccacccaacagaagattgtctgcacccgcactggcgctcacgagtagcagcttccgccatccagcgagctgagaagctggggccgttggctagtttggcactgatggattgggggatgtggcgtttctgggtgtcccctgtgtcttttgatatgggaatacagcatcaacagaagggagctgtgctagcgcctggctgtgaccaagtatctccagctcactgagctgtcaagaccggcaatcccactggctatgacaagcccaccagcaggcagggccgggaggggtagacctggggggagctcgacgacatacagtattgtcaggagaggaggtagtaactaacaactggaacaagggtgggggagactgtggatgtggccttaatgacctagccccatgggtactggaaagctgtcggtcaattctgctgttcacaaattcactgaaagaggcccccatcttcataatgttcaagtacagacaaaattgaaattgaggtcacaccccaaaactgggccggacacagctggtgagaatcctgcagcttaaggctttccctccaacctcctgtcaacctgaccccaaggcaggggcagcatgagagctgcagggcccctgcctgccagggcgataaaccgccaaggctgcctgctgaaaggcgactgactcgtgatgcctttgggaaagacgagggaatgaggaagaaagggggaaatagagagaaaaccctaaggagcctcaggccccactggcagctctggaataaactggaagggaaagaggctgggcaactgcctctttgagggagctgcaggtggggcccgaatgaaataaagtgacgcttgaaatgctgtgttcccaaccacgactgccccatcggccctgaatgaactgtcatgggtgacaggggggcctggtgggccacgcactcctcttaccaggaccagatgacgcccaggtgacggggaagcagctctggacaatgattccagaagccacattacatttgactaagtataatacataaaaacccaactgaccaaaataaacatcttctcagtgacaacctggtcggatgctgcgctctcgtggataagtgtcctttggtagtgccaggagttcgaggccactatgggggcaggagccttctgtccttggaggaagagttctggaggactcaccctctcttctgaccccccttcccttcctggggaagagtcagaagtgaagctgggggggtcatcagcagagcaggtggaagggatcagggatcagggattgggctgatgggagtttggttgcaggacttgcttttacagcataaggaaatggacacatatatgctagaaagtccaactatgagactctacaaacagaacggggcaaactccctcacttctaaccattccagaagagacaaacacggttttttcttaagctactgattggaactgtcaactatggttcctgatcactaaagactggcaaggaagtgctagacagtttctatgatgtttcactccttcatgattacaccatagtaaggaagccagggacaataactgaaatacacaagacaacacacacttgacagttcatggcagcagctcacatgggacatgcctgtgggtgtttctggaagcataagactgctgtctcatttgctactttgataaggtacttctcagttggacagatttagatataagagacatctctgtaaacacagaaaaggatataccaatatgatgaagatatgcagctagataaggacttcctgaacagaggttaaaaagatgggatcccacatgaaaactgatcaattaaaaacccacagcaagcccatgcctctaagcccctacaccacagctatggaccagacagacagtgaaatgtgtggtgttctggccccctgtctgcatcgagcaaaagcaaaacattgccattcaagaagaactccgagggaaaagggggagcagaggaagggctggggacccaggtactggtcccagctcgggtcttgggagttctgcattggtaccgctactgccctgctgcactacgctagactctggacttctgagtgaggtcaaggtcggctggcatggagcccctgttgggccactcgatgactggcaggccacaggaggcctctgtgctttcctcaactaccaaatcgggcccagctcctccagtccacttctctagagtagaagggtgaaaaggctcgttgttcagggtgggaaatgccttttgctttttcttaccagggaagagggggctacctaggagagcaagaccttgctgctctcttgctcttcacaga

SEQ ID NO: 1140 - DNA, 4052 bp, Homo sapiens
ccaggaagaacagctttgccacttgacacacaaacactgcggggagaggggctatcagtgggcaggagccaaacctcttggccttttcacctcatctgctctcactgctgagcaggacctgattaaaggtaggacagaatgggggtttgggggcaaagagatttccaaattccccaaatgttcttgaattcaaaggtaggatttcctccagggtctgggctctgcctgtgcacaagtcggagcccggagcgggagctgggggttgtgctccctccttgcactgccctcacacctgcttccttctgcctcctgacagggcaggcagggggccttggggaggcagtgagaggccagctcagaaggctcagctgatccgaggcgagcagagcaggagtgggcaaggcaggctgcccctcaggcagaagtgccttcctagttccctgggtgttttcctgacacgtcagcgctggggcaggctctgtcaagatgagaagagtgggaaggagggtggtgctgggccttccaggtcactggtgaacgctccaccttccataccactcccaaaagacaggttcagaagccatgtcctcaggtcggctacctccagattccccttgcctgtaatgctcaccaggcatctcaggccaagtgctaagtatttttagatcagcactgttgtaaaagcttgctcgtattcattcaaaaacatcgaaatgtaattttctgccaaatgttttctaggttttccttctaaattgttgagaactgacttcagtgttcagcttttcccctctaatatgtaattttagaccctgggggaggcagtatcctaacgatttataacaagtagactatgccttttctaaagattgatacaatatctaaaagagaaagacaccaaaatggagagaatcaacaaatcccgtcagagcagagagaagagtaggaagacccggagggagcagggctctgcccccccaccgggcaggtcctccagacccactccatggtaggaactctagaaacagctgactccctgaagtctaggacacaggtcctagaatctgcaggtgtgaacttgaaacaggaatccatttggggcaatgacacaggctaaaaatgtatatgcccaaagatcttcttaaagaactggtacctgtaacctcccctggcccagtcagcccagagagcctgactggaatgctctggaaaaggagctgtggttagacgggggacacagagttctggctgtcaggctccacttgggctaaaccaattccagatggtcccgcgcaggggactccgctcgtatccctctgctccctcctgggcttgagccgcttactaagtgatttaaaattcagagattctgtcagctaaagaaactcctttctccacccaacttggcagtttgtgtctggttattaccctctttcgccatcactgtcacagcaatgaaaagctgggcagagaagcaggtgacaatttggggctgctccctgtcccaggtgcactgttcatgcttcgggcctggaatgatgccacccaacagaagattgtctgcacccgcactggcgctcacgagtagcagcttccgccatccagcgagctgagaagctggggccgttggctagtttggcactgatggattgggggatgtggcgtttctgggtgtcccctgtgtcttttgatatgggaatacagcatcaacagaagggagctgtgctagcgcctggctgtgaccaagtatctccagctcactgagctgtcaagaccggcaatcccactggctatgacaagcccaccagcaggcagggccgggaggggtagacctggggggagctcgacgacatacagtattgtcaggagaggaggtagtaactaacaactggaacaagggtgggggagactgtggatgtggccttaatgacctagccccatgggtactggaaagctgtcggtcaattctgctgttcacaaattcactgaaagaggcccccatcttcataatgttcaagtacagacaaaattgaaattgaggtcacaccccaaaactgggccggacacagctggtgagaatcctgcagcttaaggctttccctccaacctcctgtcaacctgaccccaaggcaggggcagcatgagagctgcagggcccctgcctgccagggcgataaaccgccaaggctgcctgctgaaaggcgactgactcgtgatgcctttgggaaagacgagggaatgaggaagaaagggggaaatagagagaaaaccctaaggagcctcaggccccactggcagctctggaataaactggaagggaaagaggctgggcaactgcctctttgagggagctgcaggtggggcccgaatgaaataaagtgacgcttgaaatgctgtgttcccaaccacgactgccccatcggccctgaatgaactgtcatgggtgacaggggggcctggtgggccacgcactcctcttaccaggaccagatgacgcccaggtgacggggaagcagctctggacaatgattccagaagccacattacatttgactaagtataatacataaaaacccaactgaccaaaataaacatcttctcagtgacaacctggtcggatgctgcgctctcgtggataagtgtcctttggtagtgccaggagttcgaggccactatgggggcaggagccttctgtccttggaggaagagttctggaggactcaccctctcttctgaccccccttcccttcctggggaagagtcagaagtgaagctgggggggtcatcagcagagcaggtggaagggatcagggatcagggattgggctgatgggagtttggttgcaggacttgcttttacagcataaggaaatggacacatatatgctagaaagtccaactatgagactctacaaacagaacggggcaaactccctcacttctaaccattccagaagagacaaacacggttttttcttaagctactgattggaactgtcaactatggttcctgatcactaaagactggcaaggaagtgctagacagtttctatgatgtttcactccttcatgattacaccatagtaaggaagccagggacaataactgaaatacacaagacaacacacacttgacagttcatggcagcagctcacatgggacatgcctgtgggtgtttctggaagcataagactgctgtctcatttgctactttgataaggtacttctcagttggacagatttagatataagagacatctctgtaaacacagaaaaggatataccaatatgatgaagatatgcagctagataaggacttcctgaacagaggttaaaaagatgggatcccacatgaaaactgatcaattaaaaacccacagcaagcccatgcctctaagcccctacaccacagctatggaccagacagacagtgaaatgtgtggtgttctggccccctgtctgcatcgagcaaaagcaaaacattgccattcaagaagaactccgagggaaaagggggagcagaggaagggctggggacccaggtactggtcccagctcgggtcttgggagttctgcattggtaccgctactgccctgctgcactacgctagactctggacttctgagtgaggtcaaggtcggctggcatggagcccctgttgggccactcgatgactggcaggccacaggaggcctctgtgctttcctcaactaccaaatcgggcccagctcctccagtccacttctctagagtagaagggtgaaaaggctcgttgttcagggtgggaaatgccttttgctttttcttaccagggaagagggggctacctaggagagcaagaccttgctgctctcttgctcttcacagacaggccaggtcggactcagcagagcccaaggcctcctcagggctcaaaacagggtggggctggtactggcagcaggaggacaaagggcaggcagagttctggggactggagccgacaagtgtggttgggcaccgcggctgcctggaagagaagggatgaactaggaaggaggaggatggagga

SEQ ID NO: 1141 - DNA, 4046 bp, Homo sapiens
aatgctccaactactcccaccctgaagccacgaaactctaagtttactgaaagaaaaaaaaatattttttatttcagttaatcgggaagctttgtcagagccctacccataaggagaagagacaacagctgcctttattcttgttggtttgctttgcaatccgctccgtgtaaagtcagctaactctctcggtcacgggcgtccggctgtccacaggctcctctctgtttggccttggcatggaggatgaaacaatgtctttgcgctctccctcccctcggtgtttgtacttttctgcggccgtggcggcggtggcaaccgcgggctgagtcttagctggctccttggggcagccgtcgctctccagtgagcctcctctgggcatcttctcctctttgcagacgctgctgctcaagtcctggggctcaggggggctggtggggtcctcggagctctcgggctcaggtggaggtgggggcaggggtgggagcagtggcacgggggcctttggggactctgagtggtggtgatggtggtggtgctccttcttggggggtgaggaggcgctgctgctgcgccccttggggctgctctccttgcttttccgcccagggctcttacaggtcttcagtcctttcccgctcttctcaccgagggtggacaccagcaggggcttcaccacttccttgacctcgatgctgaccgtctcccgggtcttgcgcttcttgatggggagtacggtctcctgcacagatcggatagaagactccttcacggctttctttttggcctcggcggcagcggctgccaccacactccccggctttcggccccgtttcttgggaatggcctgagggtcggcctcagcttttcgcttcctgccggggcgtttgatcaccatgacctgggtggatgtggtggccccacccccctcagccttgccccctggcgaagtttgaaaaggcatcttgacaaggagcttcccaggacttttctccaggacccttttcacctgcacaccctctgacgtggccgccttgggtctcgtggtgccgctccctttggggcgtccccggcctctgccagttcctggagctttgggagatttgggcttcttaggtggtttctgctctcgccgggaggggctccctctcccagttaccgtgaagtcaaaatcattagggtccagggatgtgtcgcctaccttttcgaagtacgcaatcaactccactttagagcgaaaggcttttccctggggactgtggggacaaacagaaagacacaaggaacaattagaggctctccatagcaatgtcagagatagggcagagcggatggtggtgacaacgctctgacaaacgttactattgaacgagagtcacactgcctggctgcccctgaggacctgtcaccaaagccactcactcgtctgcctgccgctgacccccccaggcctctccaaagttcagcaaccaaagagtcaggcctggtacagaagggttgtcaggctgaggcccattctgctggttggtgcctgggcctgagtcaccatctagaacattcccaagtttgaactcaggtacggtgctcagtctctccaggaatcagtttcaacaagataatcctttgctcacccttctcatggaattaaatgaggctgtctgcaaatgtcatttgaaaactgctaacctttttgggatcatttaaaaggcagaactgaaacatgcttcttcacccctctgaacccctagctctgcaagttcctctgcttccgcagctattccatccccagataaagacttgaggtgtggagaggatagagggcctgctaccttgagaacttcccactcagggcagcgacctctgtacacggtcatttcaagcacacctggtctcagtgttcattgtttatgttccccccgaccccaccctgggcacatacattttcctgctccatgagggatccttgtccctgccctccctgccctgtagagataggagttgctcttacttacttgatcaaatacacatcatacttcccagcagagcggccagatttcctttgcttaagcttccgtgtccagccttcaggcagggtggggtcatcatacatgggtccccggtcacggatgatggagcgccgctgtttgggggaggcagaagcttccggcacagccggggcggagcctgacccttctgatgtctctgctttgcctgcctctgcgggctcagcagagtggtgggctgatggctgcacgggctcatgcttgccctctttctcttctttcttatctttcttcacctttttaaacttgaggggtttgtccttgaggccctggaggtcctggtcttctgacttttcttccctgaagtgttaaacaagtatgtaagtatcacagagaacatgccagtctgcagaacaagtgagcagaggcaggcttggacccccaccacatgcaaggccccaggccatcatacactcagatcttgatgtccttccccaggacaacagagactcgggccaagctgggacccaaatatttctttaggaatttgggctgtgggtggtgctggccggtgtgcctgacctgcactgtggccacccacaagtctcctagcactgcaggagaatcagagccctttcctctgagcggaaacactgcggctcctgagcataccaccccagcatgagtcgcacttcaagggactctgggctcgatggctgacaagaggccgtcgactgctggaaagggagccaaatgggggaggggtctcctttgtgaaggccgggccttgggtgtgtttttggttttctagaatgaggctcaatgaggcacacagtacagtgtcatggaaagcacacacaggtttggagccagccaacctgcactgaaatcctttgccgctttccaaacatgaacccagcaaatgacctcagcattctgtgcttcagtttccttatcttgacaacaggtaaccccatctaggcatccttactgtgagcatcacaggagaaaaggcacaatggcactatataaatatcagctaactcaggccacaggaaactaccgcctagggtcctgggggtgataagacaagtggtcccaggtggcgtgagcctctaacacatgttccctgatgaggaatggcctcggccacagcagatgcggagggaagagcaaggaaaaaggtgtggtccaggcagagccatacatccccttcctgccggtggagaagagcaccctacctattctagtgtgggaggcttccccgttcttttctggtgaccgaagcagctccttctctacacatcactttggcccggtggggtctcgtcagaaatggccaccgtgaggccccacaccccagcatcactatctggccatgatgctctagtactctgtcgagtatgccaccgtgaaacctcctaggactccagagcctctgcaacaacaggggcagcttggaaagaagcagcagccacctgcgagtcccttcgttagcagttcattctggaaaagagcatgactactcccaccctccgtgttctcagccccacaactcccctgtcccatgtggttcacatcagtgctagtcaccgccttgcggctggtctaccccaagagacttcccctcttgtctacactgcacagactgtgcaatgagggcaccatggcactcactggcaagcatccttaggaaaccagaactcaaatgatgtagggaagttaccaaaggctgcttagtgctgggactcagaagctgcaaggacgtatctctccagaaccatcaggtcaggtgtagggaggcaagagatgttccaatctagtgacaaggtcttagagtgagggaatgtcttgtccccaccatgactcacccctgagttcctccctatcctgtatcttcctccagaagtttagggcccagagtgtggctgccagagtcacctagagccactgcatacacaaaggcatcctacaacccacagagcagtctttcttgctgtaaagaggggtccctaatctgtcccagcacagagctcgcct

SEQ ID NO: 1142 - DNA, 4042 bp, Homo sapiens
tcgggaagctttgtcagagccctacccataaggagaagagacaacagctgcctttattcttgttggtttgctttgcaatccgctccgtgtaaagtcagctaactctctcggtcacgggcgtccggctgtccacaggctcctctctgtttggccttggcatggaggatgaaacaatgtctttgcgctctccctcccctcggtgtttgtacttttctgcggccgtggcggcggtggcaaccgcgggctgagtcttagctggctccttggggcagccgtcgctctccagtgagcctcctctgggcatcttctcctctttgcagacgctgctgctcaagtcctggggctcaggggggctggtggggtcctcggagctctcgggctcaggtggaggtgggggcaggggtgggagcagtggcacgggggcctttggggactctgagtggtggtgatggtggtggtgctccttcttggggggtgaggaggcgctgctgctgcgccccttggggctgctctccttgcttttccgcccagggctcttacaggtcttcagtcctttcccgctcttctcaccgagggtggacaccagcaggggcttcaccacttccttgacctcgatgctgaccgtctcccgggtcttgcgcttcttgatggggagtacggtctcctgcacagatcggatagaagactccttcacggctttctttttggcctcggcggcagcggctgccaccacactccccggctttcggccccgtttcttgggaatggcctgagggtcggcctcagcttttcgcttcctgccggggcgtttgatcaccatgacctgggtggatgtggtggccccacccccctcagccttgccccctggcgaagtttgaaaaggcatcttgacaaggagcttcccaggacttttctccaggacccttttcacctgcacaccctctgacgtggccgccttgggtctcgtggtgccgctccctttggggcgtccccggcctctgccagttcctggagctttgggagatttgggcttcttaggtggtttctgctctcgccgggaggggctccctctcccagttaccgtgaagtcaaaatcattagggtccagggatgtgtcgcctaccttttcgaagtacgcaatcaactccactttagagcgaaaggcttttccctggggactgtggggacaaacagaaagacacaaggaacaattagaggctctccatagcaatgtcagagatagggcagagcggatggtggtgacaacgctctgacaaacgttactattgaacgagagtcacactgcctggctgcccctgaggacctgtcaccaaagccactcactcgtctgcctgccgctgacccccccaggcctctccaaagttcagcaaccaaagagtcaggcctggtacagaagggttgtcaggctgaggcccattctgctggttggtgcctgggcctgagtcaccatctagaacattcccaagtttgaactcaggtacggtgctcagtctctccaggaatcagtttcaacaagataatcctttgctcacccttctcatggaattaaatgaggctgtctgcaaatgtcatttgaaaactgctaacctttttgggatcatttaaaaggcagaactgaaacatgcttcttcacccctctgaacccctagctctgcaagttcctctgcttccgcagctattccatccccagataaagacttgaggtgtggagaggatagagggcctgctaccttgagaacttcccactcagggcagcgacctctgtacacggtcatttcaagcacacctggtctcagtgttcattgtttatgttccccccgaccccaccctgggcacatacattttcctgctccatgagggatccttgtccctgccctccctgccctgtagagataggagttgctcttacttacttgatcaaatacacatcatacttcccagcagagcggccagatttcctttgcttaagcttccgtgtccagccttcaggcagggtggggtcatcatacatgggtccccggtcacggatgatggagcgccgctgtttgggggaggcagaagcttccggcacagccggggcggagcctgacccttctgatgtctctgctttgcctgcctctgcgggctcagcagagtggtgggctgatggctgcacgggctcatgcttgccctctttctcttctttcttatctttcttcacctttttaaacttgaggggtttgtccttgaggccctggaggtcctggtcttctgacttttcttccctgaagtgttaaacaagtatgtaagtatcacagagaacatgccagtctgcagaacaagtgagcagaggcaggcttggacccccaccacatgcaaggccccaggccatcatacactcagatcttgatgtccttccccaggacaacagagactcgggccaagctgggacccaaatatttctttaggaatttgggctgtgggtggtgctggccggtgtgcctgacctgcactgtggccacccacaagtctcctagcactgcaggagaatcagagccctttcctctgagcggaaacactgcggctcctgagcataccaccccagcatgagtcgcacttcaagggactctgggctcgatggctgacaagaggccgtcgactgctggaaagggagccaaatgggggaggggtctcctttgtgaaggccgggccttgggtgtgtttttggttttctagaatgaggctcaatgaggcacacagtacagtgtcatggaaagcacacacaggtttggagccagccaacctgcactgaaatcctttgccgctttccaaacatgaacccagcaaatgacctcagcattctgtgcttcagtttccttatcttgacaacaggtaaccccatctaggcatccttactgtgagcatcacaggagaaaaggcacaatggcactatataaatatcagctaactcaggccacaggaaactaccgcctagggtcctgggggtgataagacaagtggtcccaggtggcgtgagcctctaacacatgttccctgatgaggaatggcctcggccacagcagatgcggagggaagagcaaggaaaaaggtgtggtccaggcagagccatacatccccttcctgccggtggagaagagcaccctacctattctagtgtgggaggcttccccgttcttttctggtgaccgaagcagctccttctctacacatcactttggcccggtggggtctcgtcagaaatggccaccgtgaggccccacaccccagcatcactatctggccatgatgctctagtactctgtcgagtatgccaccgtgaaacctcctaggactccagagcctctgcaacaacaggggcagcttggaaagaagcagcagccacctgcgagtcccttcgttagcagttcattctggaaaagagcatgactactcccaccctccgtgttctcagccccacaactcccctgtcccatgtggttcacatcagtgctagtcaccgccttgcggctggtctaccccaagagacttcccctcttgtctacactgcacagactgtgcaatgagggcaccatggcactcactggcaagcatccttaggaaaccagaactcaaatgatgtagggaagttaccaaaggctgcttagtgctgggactcagaagctgcaaggacgtatctctccagaaccatcaggtcaggtgtagggaggcaagagatgttccaatctagtgacaaggtcttagagtgagggaatgtcttgtccccaccatgactcacccctgagttcctccctatcctgtatcttcctccagaagtttagggcccagagtgtggctgccagagtcacctagagccactgcatacacaaaggcatcctacaacccacagagcagtctttcttgctgtaaagaggggtccctaatctgtcccagcacagagctcgccttgttttgttttttgttttttttttgagatggagtctcgctctgttgccgatggcataatatcggctcatcgcaacct

SEQ ID NO: 1143 - DNA, 4063 bp, Homo sapiens
aagagcaaggaaaaaggtgtggtccaggcagagccatacatccccttcctgccggtggagaagagcaccctacctattctagtgtgggaggcttccccgttcttttctggtgaccgaagcagctccttctctacacatcactttggcccggtggggtctcgtcagaaatggccaccgtgaggccccacaccccagcatcactatctggccatgatgctctagtactctgtcgagtatgccaccgtgaaacctcctaggactccagagcctctgcaacaacaggggcagcttggaaagaagcagcagccacctgcgagtcccttcgttagcagttcattctggaaaagagcatgactactcccaccctccgtgttctcagccccacaactcccctgtcccatgtggttcacatcagtgctagtcaccgccttgcggctggtctaccccaagagacttcccctcttgtctacactgcacagactgtgcaatgagggcaccatggcactcactggcaagcatccttaggaaaccagaactcaaatgatgtagggaagttaccaaaggctgcttagtgctgggactcagaagctgcaaggacgtatctctccagaaccatcaggtcaggtgtagggaggcaagagatgttccaatctagtgacaaggtcttagagtgagggaatgtcttgtccccaccatgactcacccctgagttcctccctatcctgtatcttcctccagaagtttagggcccagagtgtggctgccagagtcacctagagccactgcatacacaaaggcatcctacaacccacagagcagtctttcttgctgtaaagaggggtccctaatctgtcccagcacagagctcgccttgttttgttttttgttttttttttgagatggagtctcgctctgttgccgatggcataatatcggctcatcgcaacctccgcctgccgggttcaagttattctcctgcctcagcctccggagtagctgggatcacaggcgtgtgctaccacgccaggctaatttttgtatgtttagtggagacggggtttcaccatgttgggcaggctggtctcgaactcctgacctcaggtgatcgacccgcctcagcctcccaaagtgctgggattacaggcgtgagccaccgtgcccagccagagcttccttttcatgtctctgagtcttacagctctcaatgggaaatgacgaagaaccctggaaagctaggtgtggcctgttgcccaccagagatcagcctttgagaatggacccctaggcagctccccagctccccataaaggagggagggaaggggagccaccagcagagtgggccaagaaagcagacagatgggaatcgctacttctacacaatccatcatggcactgcctaacgccagggctgctccctagaacccggacggtcctaatgtcagagaaaaacagtgaactaatgggaaagatctggcttcttcgaaactctcatttgcatttcccaaataccttaatcaccatgaggtcaaactataaacctaaacgtgacgtaaggaatgccttctagaaatctatgctaaagagacacctccagaaatctcaaagaacatatgcatgatgttatttgctacaacattatttttaccagccaaaggcttccaatacccccgatccctatcaccagggcacttgctgaataaacttatggtgcgcccacacactggagtactgtgcagatccaaagggactaaacaagagctctaagaactgcgatggagtcatttccaggatccactgtgaagcaaagggagcaaagcgcaaacatatctactgcattctaccaaagaaagaagggggggtattaaggaaggacacaccaggaactaatgaaattgattccctgcatggggtagggggaaaaaggtaagggtacaggcacaggagtgaggcctagctgaacatgcctcagtgtaattctgacttctgaatcatgtaaatgtttatattacccaaaataaaattcaaactaaaagtaacaaaaccttattacacttaatgcaaataaaaacaaatgagttcgggccaggcatggtggcttcagcctacgatcccagcactttgggaggccgaggcgggtcgatcacctgaggtcaggagtatgaggctgcagtgagccatgactacatcactgcactccagcctgagtgacagagcaagaccctgtctctctctctctctttttttttttttgagacagagtcttgctagagtgccatggcgtgatcttggctcactgcaacctccgactcctgagttcaagccttctcctgcctcagcttcccgagtagctgggattacaggtacctgccatcacgcccggctaatttttgtatttttagcagagacggggtttcaccatgctggccaggttggtcttgaattcctgacctcaggcgatccacccaccttggcttcccaaagtgccgggattacaggcatgagacaccacgcctggccaagaccctgtctcttaaaaaaaaaaaaaaagaaaagaaaaaagaaaagaaacaaatttaattctatatcaaattgacaatataccacagagaaaagatttatttcaaatgacttttgactacagtgctctgcaaacctgtagtgggacatattctaaggccaacaataacactccaggggcagtaaacacactagattggctcccaggagagatatgtgattctgcttctggggcatcttgtgccagaaagcccggggagtgcaagagaaaaacagggagggcccatgagaggcctctagcagtggtccaggtgtggcccagggtgggggcagttgaggatttggggctggtctaggtggtgaagcaacagagctcgcaggtggattagtgtgggggtgaggggcaagggtgagtcagggaccatgtccaaagcctgggaagatggtggtgccactgattgagaaggaaaagactgaggggccggctgggtgcagtggctctcacctgtaatcccagcactgtgggaggctgaggcaggtggatcacctgaggtctggagttcgagcccaacctggccaacatggtgaaactccgtctctactaaaaatacaaaaatgagccgggcgtggtggcaggtgcctgtaagtcccagctacatggaaggctgagggagaagaatcgcctgaacccaggaggcagaggtcgcagtgagctgagatcgcaagactccgtctcaaaaaaacaaaaacaaaaacaaaaccactggagcggcaggggagcaacacccacagagacagttataccatcaaggagagaaaacagttcttcagctactcgctagaaaggggggaaaccccgctgtgatcagattctgagttgggcctgaatgaaaatgaactgtctgcttggggttttaaaggctttttattgtggtaaaatatacaaaacaggtcaggtgtggtggcttacacttgtaatcccagcactttgggaggtgaggcaggtggatcgcttgagctcaggagtttgagaccagcctgggcaacatagcaaaaccctgtctctacaaaaaaaaaaaaaaaaaaaaaaaattagctgggcatggtggtgtgtgcctgtaatcctagctactcgggaggctgaggcaggaggatcacttgagcctaggaagttgaggctgcagtgagccgttgatcatgccactgcactcctgcctgggcgaacaaaccagacacatatatgtctcaaaaaaaaatacatatatatatatatatatatatatatatatatatatatatatacacacacacacaaaacaaagtttacctttttaactatttctaagtgtacaatgaatgaacttttttttttttttttttgagacggagtcttgctctgtcacccatgctggggtgtggtggcgcaatctcggcttactgcatacaggctctgcctccctcctgagttcaagcgattctcctgcctcagcctcccgagtagctgagattacagatgcgcaccaccacgcccagctaatttttgt

SEQ ID NO: 1144 - DNA, 4042 bp, Homo sapiens
gaccccagtctctacaaaaaatataaaaattagccaggtgtggtggtgcatacctgtagtctcagctacttgggaggctgaggtgggaggactgcttgagcccaggaggttgaggctgcagtgagtcgtgactgtgccattgcattccagcctgggtgacaaagggagaccttatctcaaaaaaaaaaaaaaaaagcccattctaactatgggaagatatagagtagagggagtggggcaggagggcacaagatgccacaggggggctctgcagaagcagatgttgggtcacggtttgaggtgtaagatgttcatcaggaactgacatccataaagggaggtgggaagaagtcaaagagaaggccctataagggccttgtacccttacctcgctcagtcaccagggtgctgtcctggaaatggcgtgaccttgggtgaggaggctcttgcagctgaggctaaccggagtgtccgcagggcatccagagaggagagtgacctccgggtctgccacgtgagactactgcagagtctaggcagggatgcagggagctggtctaggtgccatccctgaagggcatgggcaccgggacagcgaaagggcgagagatccaggactctggcttccgtttctcatgtttttgatactgaggtatttagctttctagaggcctaaagggcagctggatgtatgaatctggagttcaggggagaggtctgaagagccaggcgagtgcgtgagggcgtgctgaatataagtgtaaacaaccctccccctgctatttggagttgtgatgaggagaaagaatcagcagaggagacagagaaagaggagtcagtgcagagaaggaagatcagacatatctgtcaagattattggtggcaatcaatagaaaccaactctagctgatttatgcagacaaggactgatgaaaagctattgaagatgcatgtggtgatggttgcacaatataaatgtgctcaataccacagaattgtacacttaaaaatggttaaggcagtacattttatcttttgtgtattttactgcaatttttaaaactagggggaaaaggctactgggtgataagagaatccctagagggttggaggaacaggtttgagtccagttggctaggaacaatacttcaaatccttctgccaagccagtccaaacagccagcactgcctgtgcgaccctgcaaggcagcagcactggccactggcactgtggcctaggagctcgtctttcctgcagccccaatgccaggagacacggctctcctgcctggccctgctcctcctagcatgtgagtctgactggcagaggccagggtacatacctacaccctcgtgtagaactcaggtaatttctttctgtaaggggccagatagtattttccaccttgtgggccagacagtatctgtcacaaccagcccacctgctgttgtacaggagagcagtcttggacaatgcacaaaggacggggtggaactgggtcctggtaaagcttcatttacgaaaacaggcagtgggccggacttggcccttgagataccgtttgccaactgctgccctgaccgaaagggaagctaggcaaataagcatctggcatttgcagtgactacaatcagaggtcgccaggcctcccatcaactcgtgaggtgagaattctcccaaacccagagggttcaagatgtgaggtgagatggccacctggagagtatgaggtaccagaagagacacaaggaaagggctgagaaggagtgacagccactgatgactgttaagattatttcatggaatgtggaaaagcaagtgttcatggagcaagctgagcaaggagcagcaggcaaggaagagggcccatgagtggagagaactcttagagagtttggctaaaaggagaaacagagactgagcaggagccaaggaggtatgcgctgaagggagctcagttacgatggtaaattctaaaacaagttcgtctggtgatgggcacagttcacaagaggagggaagaccaatggagtcccaggggcatcaaacagtggttgacactgcaagctgggaagacagtaagtcctcatcataggcagagctaagttagaactccgtgggtggagttccagagatgaccaactccaggatacgaccatgggaatgagtggcagaagagacagggaaggagccaggcactaggagggcggcctacatgcgtgtgtgtgctggagtcaggaactggcacggaatcctcaataagaggactgactggggcagtgagcaagcccacaatcaggggtctgtgggccgagaggctgtgtcacagtccccctatgccatgcctggaggcacatgggatcagagacctctgaggacttggcaggaggcacaggcgtggagaggcagggcctaacccaggtgtgtgtgtcgcgggggggaggggggcggtggttaggcagggctctttggggaagagatacctgacagggtcttcaaggataagcacgacaaggcaaggccacaggggaaggaaaggagaagagaaggggacttgggcaggggagccaatgacaaaggccaggagtgcaagaaacatggtacctgggaggaactacaagcagtcctggactgctgagggctatgtccataagaaaagcagcagcaacagaaggggccacaaagagaagcaggagccacatgaggggccctgatgtcactcaaacacagggtgccactcttgggtttaaagcaggggaatgagattgatgatagggattgtgtggaagatagagaggtggaggaaagatcataagttatcatgggagtcccagagcaagatgagggattgaaccaggacagcggtagaagggatgacagaagacaaaagagggacaaacagttaaaggaacaatttgtgggacttggtggctcccttggatgtgggcagtgaagggcaggggcctgttgggtttccagcttgggtgactggtatggctatcaactgtgacagaaaacagtggacatggcatttgtctatttggtcttctgatctaccttatcttgaaggagacaggggtggtagggcgcccagtgggttgagaagaatggaagggagaaagagggcagaaatctctcaaatgttttgcacagtaaaatctgactaaaatgcacacacgccccacaagcctttttctttttttttccccccaagaagcaaaacaagttttatttccatagtagttccttttagtgctctctgtcgccacctaatggatggcctggtggaagaggctcaagaggtagcagcctagcctattccacggcagaggaatcaaactcacccaggcagggagaacgggactgcacctgggtgggggaggaccaaaagaagcccagctgcttctggaagatcattgggagtctcttctggaagaccaggggctcttggagctaaaatagacgttcgttcattaataatacctacttcaacaacttaagatcatgttcagcggatgcacatcaaccttgacttgtctgtgctccccaaatcaatatgcctcaatattgaggcatattgagggaacaatctgtagatattcatgaaattgtctggtgggacaaaaattgtggggcacttgagcctagctgaactcagttttaagttctagcatttaacacaccacctctaagtttacgtgtactttatgagtgcaggaatgcaacaaaaaaatctagtgtaaagtcctggccctcagggcaaagcaagggaactacaactcttgctgcgaactgccttcctcccacagatgtggcacattcacaaatcacattcattgaacaagaaatggaacaagtgccacaccagaggtgacaagaagaggggaccatacaataataggtaacttccctgtcacacgagactgcttggagacaaggatacagagcccagcataggagatgggacaaaatgatgagggtcaaggaccacacctggtttaactcccagtgaagagttttagccagtaaagagctgcaaga

SEQ ID NO: 1145 - DNA, 4045 bp, Homo sapiens
aggcagtacattttatcttttgtgtattttactgcaatttttaaaactagggggaaaaggctactgggtgataagagaatccctagagggttggaggaacaggtttgagtccagttggctaggaacaatacttcaaatccttctgccaagccagtccaaacagccagcactgcctgtgcgaccctgcaaggcagcagcactggccactggcactgtggcctaggagctcgtctttcctgcagccccaatgccaggagacacggctctcctgcctggccctgctcctcctagcatgtgagtctgactggcagaggccagggtacatacctacaccctcgtgtagaactcaggtaatttctttctgtaaggggccagatagtattttccaccttgtgggccagacagtatctgtcacaaccagcccacctgctgttgtacaggagagcagtcttggacaatgcacaaaggacggggtggaactgggtcctggtaaagcttcatttacgaaaacaggcagtgggccggacttggcccttgagataccgtttgccaactgctgccctgaccgaaagggaagctaggcaaataagcatctggcatttgcagtgactacaatcagaggtcgccaggcctcccatcaactcgtgaggtgagaattctcccaaacccagagggttcaagatgtgaggtgagatggccacctggagagtatgaggtaccagaagagacacaaggaaagggctgagaaggagtgacagccactgatgactgttaagattatttcatggaatgtggaaaagcaagtgttcatggagcaagctgagcaaggagcagcaggcaaggaagagggcccatgagtggagagaactcttagagagtttggctaaaaggagaaacagagactgagcaggagccaaggaggtatgcgctgaagggagctcagttacgatggtaaattctaaaacaagttcgtctggtgatgggcacagttcacaagaggagggaagaccaatggagtcccaggggcatcaaacagtggttgacactgcaagctgggaagacagtaagtcctcatcataggcagagctaagttagaactccgtgggtggagttccagagatgaccaactccaggatacgaccatgggaatgagtggcagaagagacagggaaggagccaggcactaggagggcggcctacatgcgtgtgtgtgctggagtcaggaactggcacggaatcctcaataagaggactgactggggcagtgagcaagcccacaatcaggggtctgtgggccgagaggctgtgtcacagtccccctatgccatgcctggaggcacatgggatcagagacctctgaggacttggcaggaggcacaggcgtggagaggcagggcctaacccaggtgtgtgtgtcgcgggggggaggggggcggtggttaggcagggctctttggggaagagatacctgacagggtcttcaaggataagcacgacaaggcaaggccacaggggaaggaaaggagaagagaaggggacttgggcaggggagccaatgacaaaggccaggagtgcaagaaacatggtacctgggaggaactacaagcagtcctggactgctgagggctatgtccataagaaaagcagcagcaacagaaggggccacaaagagaagcaggagccacatgaggggccctgatgtcactcaaacacagggtgccactcttgggtttaaagcaggggaatgagattgatgatagggattgtgtggaagatagagaggtggaggaaagatcataagttatcatgggagtcccagagcaagatgagggattgaaccaggacagcggtagaagggatgacagaagacaaaagagggacaaacagttaaaggaacaatttgtgggacttggtggctcccttggatgtgggcagtgaagggcaggggcctgttgggtttccagcttgggtgactggtatggctatcaactgtgacagaaaacagtggacatggcatttgtctatttggtcttctgatctaccttatcttgaaggagacaggggtggtagggcgcccagtgggttgagaagaatggaagggagaaagagggcagaaatctctcaaatgttttgcacagtaaaatctgactaaaatgcacacacgccccacaagcctttttctttttttttccccccaagaagcaaaacaagttttatttccatagtagttccttttagtgctctctgtcgccacctaatggatggcctggtggaagaggctcaagaggtagcagcctagcctattccacggcagaggaatcaaactcacccaggcagggagaacgggactgcacctgggtgggggaggaccaaaagaagcccagctgcttctggaagatcattgggagtctcttctggaagaccaggggctcttggagctaaaatagacgttcgttcattaataatacctacttcaacaacttaagatcatgttcagcggatgcacatcaaccttgacttgtctgtgctccccaaatcaatatgcctcaatattgaggcatattgagggaacaatctgtagatattcatgaaattgtctggtgggacaaaaattgtggggcacttgagcctagctgaactcagttttaagttctagcatttaacacaccacctctaagtttacgtgtactttatgagtgcaggaatgcaacaaaaaaatctagtgtaaagtcctggccctcagggcaaagcaagggaactacaactcttgctgcgaactgccttcctcccacagatgtggcacattcacaaatcacattcattgaacaagaaatggaacaagtgccacaccagaggtgacaagaagaggggaccatacaataataggtaacttccctgtcacacgagactgcttggagacaaggatacagagcccagcataggagatgggacaaaatgatgagggtcaaggaccacacctggtttaactcccagtgaagagttttagccagtaaagagctgcaagaaggaaatcacacaccacgaagaggccactaagataaacgcttgaatctgattaagttttcacctgaaaagtgtgggtaaggacaagcctgccttgttgggtagtacagattcagtgaatgagccctcagatcctgctggatcccgtgatcagataaacagcagcttctcaggaaccactgcatgtgaggttagggtgaggggagggacccgatggagatctaatcccaggggtttggtcacaggggctggcgaatgagaggtggagaccgggaacatacgccactttttttttttttttttttttttttgagacggggtctcactgtgtcacccaggctggagtgcagtggcaccatcttggctcactgcaacctccgccccccaggttcaagcgattctcctgcctcagccacccaagtagctgggattacaggcgcctgccactgcgcctggctagtttttctatttttagtagagacggggtttcaccatctcggccaggctggttttgaactcctgacctcgtgatccacccacctcggcctcccacagtgcggggattacaggcgtgagccactgcgcccggccagccactctttttttttgagatggagtttcgctcttgttggccgggctggaatgcaatggcacgatctcggctcactgcaccctccatctcccaggttcaagtgattctcctggctcagcctcccaagtagctgggattacaggcatgcgccaccacgcccagctaattttgtatttttagtagggacgggatttctccatgttggtcaggctggtcttgaactcctgacctcaggtgatccacctgccttggcctcccaaagtgctgggattacaggcatgagccaccaggcccagcctaagccactcttttggaaagctcagcagagaagatgcatgaggtaatacgacgcgttaggtggcctttaaagggatgtttatagcttttcataacatgggtgtattagtctgctcaagctataacaaaata

SEQ ID NO: 1146 - DNA, 4047 bp, Homo sapiens
actcctgggctcaagtgatctgccctccacgggcttccaaagcactgggattacaggcacgagccaccatgcccagctaaaaatctgggttttcagagacattagtgaaaataaagagtgaatgtttttcccatccaaggtcacagacccggctgaattctcaaccaaagttggaggccttggtctagaaagatacataccaaatattaacagcagttttttttttttttggatagtggaatcgccagagtgattctattttgttttatgatatttttgtagagatagggtctcaatatgttgctcaggctggtcttgaactcctgggctcaaaagatcctcccaccttggcctcccaaagtgctgggattacaggcgtgagccatggcatgcctggcctaattttttatctttgtacctatacgcattttcaaagttttgtacaatgatgttttacaattaaaatttataagagcttaataaatactatgtatttgtttgtcttaaacaacctggaaggatgactaggaaattttatacaactgactacagatgttcaaccttctataactacttaagtgttatgatgactctaatcattcccatgttcttacaagccaagaaaaaaactcactagaattatttattctggagttaaaaagaacaaaaaaacaaactgtcacaactgcagacatttgtctatttttttgccaagtgtaattccaaaaacagctgaaaatattagaacaaattagtacttaatatggactaataccttctgctgtttacaaaaacacaaaacccggaagtacacagaaacttgtattttaaaaataagttattgtgtgtagaaagacttaaaatacaacttatctaagtaatgccaaaacttacataccaccagacaaagtgctttaatgctttatttttatttttttgagacagagtctcgctctgtcacctaggctagagtgcagtggctcgatctctgctcactgcaacctccacctcctgggttcaagcaattctcctgcctcagcctcccgagtagctgggattacaggcgcccgccaccatgcccggctaatttttgtatttttagtggagatggggtttcactatattggctaggctggtcttgaactcctgacctcaagtgatctacccgcctcggccttctaaagtgctaggaatataggcgtgagccaccacacccggccgaaaatgctttaatgttttaaaaaatgagtcatacatagaaagtaagcacatgcttgaaagtgctcatgttcaagttttagcagcaatgtggaatgttgcaaaagagacagggacacagggaaatgtgcatatctcagaagcctactttgctttctttcaaatctaaaaataaaacctttggactgccctattaataagtctagaaaatggatgcttttttttgtggaaagctttcgcaaacatggaaataaaaatatcttcttctcggttaacaggactaaaggatgtaaacataaaccagatgccaatccttgtttctctacaatccccttctccctcatggctctggacaggcttctattgtaaaactatttctatggcacaaggagacatatcaaatgaatgaacattggtctgcacggagcaatacagaccaggttcaaaagtcaaatgttgagtgaaaagagtaagttgtaggatgttccacatagtaggatatcatccagtaaatttgcaaaacactttattccatgttgtcatgtgtaatacaacaaaaaccttgcatggggagtatctcggtgacctttagggagcaggctaccttggggaagcagggcagacaaagagtgcaaccacagggctgggaattcagctgaatctgtcctatttgagttccatagtaagagggctgacaggaatacgaccaactgataacatttcctaagtctgggtgaaaagtacccaaacagctactacttgagctgagcgtagaagccaggaaggaagagggcgggggaagacaggaccttagaatgacgccaggaagaatggtggaagagctgacagcatggaggaagagctgggaacagcgcttagggcccacctcctgagcccaggcttggggagttacagcagtgctgtccacaggggctcatcagagtggacctggtacttgacaagacaggagtcagcttgctcacacactgcttcctttaccatcaaagtcttatgtaaaaataaaaaataaaaaatcagtagaactaagcagcgtactttgtaccacagctgactcccattccatgtaagctcctgaccttctcacagcccagcactttcgtgcattagacaatgaactgtgctggagaagatgatgcctgttcccatgagtctcccaggtctcctgggacagaagtgaagggaaagaagggtccatgaagagacctggagtggagtgggagccccaggggcccagtggatagggtggggtggaaaaggacagcatagatgggcagagcacctcacgctgccttctggggcccagggaacatctaagagtgtgacggggcctggaaagaaagccgagcctggccgggcgtgggggctctcacctgtaatcccagcactctgggaggccgagacgggtggatcacctaaggtcaggagtttgaggccaacatggtgaaactccgtctctactaaaaatacaaaaattaaccgggcatggtggcgggtgcctgtaatcctagctgcttgggaggctaaggcagaagaattgcttgaaccctggaagtgggggttgcagtgagccgagatcatgccattgcactccagcctgggtgacagagaaagacgtctcaaaaaaaaaaaaaaaaaaaaaagaaagaaaaaagaaaaaaagaaaaatgctcctctccacatgtcctggctggttgttcatgcctcgtcttcacacagtggactctctgaatgggcctgagagattctctcctgtcagagcctctacacatgctggtccttccaaaagactcatgcatctctccccactgatgctttgtccttgacctagctaatgtttccttgctgttcaggtcttagatgccatttttcaaagaagtctcctccctgacctacctcccaattcttggtaggatctcctctgatttttatgtgctcccttagtggctggaacttctctccatcacagaagttagcctcttgtaaagtcatagcccatttgcctgtctgtacctcccattagaccagaagactgctgagggtaggatagtttccagcagctagcacagtaactgacacataataaatgctcaattagtacagcttaaaaaagtactgctatataaagagttcaacagtcacagaacaacaaagcaaccacagcctgttcctgaatacttctaggacacctcttatgcatattacagcatgaggaggcagaaggtccagcagcagagggagattctccaaccccgagtaccaaggaactaccacaacctagaatggtcccaaaataaaaatgctccactttcttcaaggttcacaaacaagaactggcaagttccccttgtcgagtaaaaaggtccttccctcacatgccctactcagatgaggtcacttttgatgaaatggaagtttccaaagttttgctttctagtgctaactgctaaaaacttcttcctagcctaacagctctgtgatctctacaaacagtattgcagtgataaattcgtatgcttatctacttacacgcaactttttctctaatggtctgcaaataaaaggctactcttgtcgggctccatggctcatggttgtaatctcggcactttgggaggccaaggcaggaggattactcaagcccaaggagttcaagaccagcctgggcaacacagtgaaaccccgtgtctaccaaaaataaaaataaaaataaaaataaaaaatttagccaggcatggcggcacatccctgtagtcccagctacaagagagcctgaggtgggaggatcacatcagccccggagttcaaggc

SEQ ID NO: 1147 - DNA, 4051 bp, Homo sapiens
acctatacgcattttcaaagttttgtacaatgatgttttacaattaaaatttataagagcttaataaatactatgtatttgtttgtcttaaacaacctggaaggatgactaggaaattttatacaactgactacagatgttcaaccttctataactacttaagtgttatgatgactctaatcattcccatgttcttacaagccaagaaaaaaactcactagaattatttattctggagttaaaaagaacaaaaaaacaaactgtcacaactgcagacatttgtctatttttttgccaagtgtaattccaaaaacagctgaaaatattagaacaaattagtacttaatatggactaataccttctgctgtttacaaaaacacaaaacccggaagtacacagaaacttgtattttaaaaataagttattgtgtgtagaaagacttaaaatacaacttatctaagtaatgccaaaacttacataccaccagacaaagtgctttaatgctttatttttatttttttgagacagagtctcgctctgtcacctaggctagagtgcagtggctcgatctctgctcactgcaacctccacctcctgggttcaagcaattctcctgcctcagcctcccgagtagctgggattacaggcgcccgccaccatgcccggctaatttttgtatttttagtggagatggggtttcactatattggctaggctggtcttgaactcctgacctcaagtgatctacccgcctcggccttctaaagtgctaggaatataggcgtgagccaccacacccggccgaaaatgctttaatgttttaaaaaatgagtcatacatagaaagtaagcacatgcttgaaagtgctcatgttcaagttttagcagcaatgtggaatgttgcaaaagagacagggacacagggaaatgtgcatatctcagaagcctactttgctttctttcaaatctaaaaataaaacctttggactgccctattaataagtctagaaaatggatgcttttttttgtggaaagctttcgcaaacatggaaataaaaatatcttcttctcggttaacaggactaaaggatgtaaacataaaccagatgccaatccttgtttctctacaatccccttctccctcatggctctggacaggcttctattgtaaaactatttctatggcacaaggagacatatcaaatgaatgaacattggtctgcacggagcaatacagaccaggttcaaaagtcaaatgttgagtgaaaagagtaagttgtaggatgttccacatagtaggatatcatccagtaaatttgcaaaacactttattccatgttgtcatgtgtaatacaacaaaaaccttgcatggggagtatctcggtgacctttagggagcaggctaccttggggaagcagggcagacaaagagtgcaaccacagggctgggaattcagctgaatctgtcctatttgagttccatagtaagagggctgacaggaatacgaccaactgataacatttcctaagtctgggtgaaaagtacccaaacagctactacttgagctgagcgtagaagccaggaaggaagagggcgggggaagacaggaccttagaatgacgccaggaagaatggtggaagagctgacagcatggaggaagagctgggaacagcgcttagggcccacctcctgagcccaggcttggggagttacagcagtgctgtccacaggggctcatcagagtggacctggtacttgacaagacaggagtcagcttgctcacacactgcttcctttaccatcaaagtcttatgtaaaaataaaaaataaaaaatcagtagaactaagcagcgtactttgtaccacagctgactcccattccatgtaagctcctgaccttctcacagcccagcactttcgtgcattagacaatgaactgtgctggagaagatgatgcctgttcccatgagtctcccaggtctcctgggacagaagtgaagggaaagaagggtccatgaagagacctggagtggagtgggagccccaggggcccagtggatagggtggggtggaaaaggacagcatagatgggcagagcacctcacgctgccttctggggcccagggaacatctaagagtgtgacggggcctggaaagaaagccgagcctggccgggcgtgggggctctcacctgtaatcccagcactctgggaggccgagacgggtggatcacctaaggtcaggagtttgaggccaacatggtgaaactccgtctctactaaaaatacaaaaattaaccgggcatggtggcgggtgcctgtaatcctagctgcttgggaggctaaggcagaagaattgcttgaaccctggaagtgggggttgcagtgagccgagatcatgccattgcactccagcctgggtgacagagaaagacgtctcaaaaaaaaaaaaaaaaaaaaaagaaagaaaaaagaaaaaaagaaaaatgctcctctccacatgtcctggctggttgttcatgcctcgtcttcacacagtggactctctgaatgggcctgagagattctctcctgtcagagcctctacacatgctggtccttccaaaagactcatgcatctctccccactgatgctttgtccttgacctagctaatgtttccttgctgttcaggtcttagatgccatttttcaaagaagtctcctccctgacctacctcccaattcttggtaggatctcctctgatttttatgtgctcccttagtggctggaacttctctccatcacagaagttagcctcttgtaaagtcatagcccatttgcctgtctgtacctcccattagaccagaagactgctgagggtaggatagtttccagcagctagcacagtaactgacacataataaatgctcaattagtacagcttaaaaaagtactgctatataaagagttcaacagtcacagaacaacaaagcaaccacagcctgttcctgaatacttctaggacacctcttatgcatattacagcatgaggaggcagaaggtccagcagcagagggagattctccaaccccgagtaccaaggaactaccacaacctagaatggtcccaaaataaaaatgctccactttcttcaaggttcacaaacaagaactggcaagttccccttgtcgagtaaaaaggtccttccctcacatgccctactcagatgaggtcacttttgatgaaatggaagtttccaaagttttgctttctagtgctaactgctaaaaacttcttcctagcctaacagctctgtgatctctacaaacagtattgcagtgataaattcgtatgcttatctacttacacgcaactttttctctaatggtctgcaaataaaaggctactcttgtcgggctccatggctcatggttgtaatctcggcactttgggaggccaaggcaggaggattactcaagcccaaggagttcaagaccagcctgggcaacacagtgaaaccccgtgtctaccaaaaataaaaataaaaataaaaataaaaaatttagccaggcatggcggcacatccctgtagtcccagctacaagagagcctgaggtgggaggatcacatcagccccggagttcaaggctgcagtaagctatgatcatgctgttgcactccagtctgggtgatggagtgggatcctgtctctaaaaaaacattaaaaaaaataagtaaaaaatttaaaaactggttaaataaattgtggtacatccataacagactatttaaacccaacccttaaaaggaatgatacggctctgtatgaaccgattctaaataatctacaggatacattaaaataaacaaatgtgcacaatattttatagtatgtgtaaaaacacaacgcccacatacccttgtgtatttatacacacatgtaaaatatatacacaaacctaaacacacaaaaatatgtccaatagagacaaagagtagaatagtagttgccagagggtggggtgggggaaaggggagaagtgggagttagtgtttaataggtatgaaa

SEQ ID NO: 1148 - DNA, 4064 bp, Homo sapiens
cgtaatctgtaatctgagaaaaagactcgtaaaaacccaaaccaccctccaggcctaacatcttccagaagaaacccattcactgcccatattacatttagtccacacaatttctgagacaaagcacaaagcactagccatacaactcccaccagcataaatacgtggagtacaaagaatgtcctgtcagctgggcccagagcacaccccacagcagtaaaagagaatgacaatttgagtcacaggatcaggagcagaatcaaatttgggacttgaggcagtgtgatgctcttctggtcttccgcttccttccacaccttctattctccttcagccaaaccttgccctcacataatccctaagcaggctatttcttatggatgtctacaacagcttcacactgaggtgtcagaaaccactagagagacaacaaagaacgacttagggtctcagtcggaatcacaatggccgcataagtgaaaactcacatttttgcttaggggaaaaaaaatgggaaaattcaattggaacattctgctttaccacacagaagttctgaaatccacatgtcaaaacatcaaatgcggagtgaccactaatcaaaaagacaaaacaaaacaacaacaacaacaacaacaacaaacagcttgagatgttgagcctgaaggttgagaaattaaggaaccattcatttttacaaaactaaagtccacacaatggtgccaagtagttcaaactgcagctgatacagcacctgagtgtcagacctagaatgactggggcccccaggtttttacaaagtactcatcctcctctagagtcccaagaaccagatgtatatctgggtactctctttagttaccatgggaggagtgtagcaagcacatgacattagccatggcccccggtgttctgagacagctttcaggagggtgtccttctagggaaccaaccacataccagttcccatatctgaaaatgcattaccactgctcactaatgttgaccactaagccatttaccccaaaccaaagcaaacacatgctgaagaccgctaaggcaacagcagcagcgcaaaagggctcagtgcaagcgctctcagctcagctgacctgcttcaaggtgaactgaagttgcagatcaccagttccggctctaatctgacgcccgcccccagatcacgctgtggcgaccaagtaaccctacacacactgacctttcagggctcagggaagtgacttttttttattatatggcacagtttggcacagttatgtctttagtctttggggtacttttatactgtccaagagtagtatatttttttcctcttttccttttttttttttttttaaaaaaaaaaaaaacagatggccaaaccaggacatatactaaaaaaaaaaaaaggaaggttacttacctgagccctaacatcccagctaccatggaatcctgttggagctggtctacagaagcaaggtgtattctggggagtcacatgtcacatcaaagcaggaactggtgagtctgtatttttatggagcctaaaacaaagaaaattgtaagttgaaagcccccattgagctgcacgacctttttcccagggctatttgggacattttgaagataaacacatagacaaagtactaggctatttcccagcttacctagctagaaacaaaggataagctgcaaattactggcacgtaacacacagtgctaaaataaaggaaagattcatgcttgttagaatcaacactatcacaagccttgtcacctctaggggacacttcgacactacaaaagcataccatgagtggcgatttctggcaagtatttcttctaccacggcacacagaaattctcagggaagaatacatgttcaagagaatacgcaacatcaaaataccatccctgaaagaacacatggaacctagaggcagtctcccttctttttcaagcagctgaatgaagttgcaataagctgctgtaacaacatcacataaaggggctttaatcctgagagaaaaaatcagcaccaagggaaaccaagtgctctgggagacccaaagccatcatccaaaacatgcaagtctatttcagggcaatcagttttaagcctctcagatcagtcaatctcgatgttcaacaaactcagttattagtttgatagtttctctttttcttttgaacacatgttcaaaaaaggacttttgtcagtaccttttttgtcattaagataaccatcatttcctagttaaagcctaaactgccccatatgaattagctaatttctgatactatgctggcccaagagtagcacttttataagctaaaaacgaaagctcagagcatacaacttagagactattcacacaattactcatgtaatcaaacccagaagaagggcaacaccaaccaagtcttttactggtctgttgctgctctacagctaccaggatggtacctaaaattatcttttgaggttcagtgaggcctcataattcccttaaacagtcaagtcatagaatactttgaaatcccagaagtcaagttaatagtattactcggctagctatataataaaaaccaaactggtatcctggctaggaggccctggaaaagtcacaacttctcagggacacaagttttttttgtttgtaaactgatggtgctggactaagaatccttctagttcttaaagtttaagataattaacttaagatttcatgtcaaaaagaaaagagccagaggctgggtgcggtggctcacgcctgtaatccctgcactttgggaggctgaagcgggtggatcacgaggtcaggagttcaagaccagcgtggccaagatggtgaaaccccgtctcgactaaaaaaaaaaaaaaaaaaaaaaaaaaaatacaaaaattagccaggcgtggtggcaggtgcctgtaatcccagctacttgggaggctgaggcagagaactgcttgagcccgggaggcagaggttgcagtgagctgagatcgtgccactgcactccagcatgggtgacagagtgagactgtctcaaaaaaaaaaaaaaaaaaagaaagaaagaaaagagaaaatgagagcagtttatgaaatctaaaaaagaaagttaatatatatataaaacacccctagctcttgggctaggaagacaagtgcatccttactaaggcttggtcctgtcaacttcagaggcaataatgagagcccagactacagtgtctacagtaactgcaaaacagccacacagcacagcgggaacacattcacacgccaggagacccagcatacatgtgcttgaagaagttataagactcaggctttattctctaacgaaatggtcattccccctttgatgtgggggtgggggtggggatgccctgcccaccccccaattccggctcccactcagttatcccacataccatacataccatcaaagtatttaagcaatggcatgcaaagcaagctttcgacaggtttcttgcaagagaaaggcagaagagaacaggtaaaagcagaagagcacacaggtaaaagcagaagagcacaacttctacttaagcccaaagaagagggacctgttcacatcttgtcctacccggaatgatgcacacgcacaggggcttgccgggacagcagtagtttcactggaaagggctggtatggaggcaccgaggacaaggtccttccatcgcagcggtgataatgctctacccaagaaaaaaagattgcgtctgccagccacgcaagactggtctgcaaggatgtcaccatagcagagggcagggaaaacaagcaggtgtcctgccacactctttgggactggccagtctaggagtgtgctttaccccacgcactgaaaacactggttactagaaatatcaaacatttcctgtgattctctcctccaagataactcgggcagcttgagaacaagctgctcttagctaattaaaagatttctgctgatattaacctttataaaagatttcaggttccaggacacgtcatttatcatgcagagtcccaagcaggtacattagcaat

SEQ ID NO: 1149 - DNA, 38392 bp, Homo sapiens
agccaccaagttatgtggggcactgctttgccttccccaacaagtgtgtcagcctcaactctgggacttgcgggtgatccagtggggtagagggagagcagtttctcgtgccatgagcttcttcaacagccatgacttcattctttggccacgacccatagtaagaaatccattctacatcataacccagcacacccacacgtgtaaacagacatataaataactgaaaaatggttgttcttcgagtgaaacaatacttacctttactgcatgtggtgatacactggcatttcttatgctatttcctttttctttttaatgcttgttgaaacccagtaaattgatttcacaactcaataaagggttaggatatgcaattttgaacaattccagctctgccacctatcagctgtgtgacctggggcaagttacttaacctctctgtgcctcagttacctcatctctaaggaggggataataatacctacatcagtgagttgttcagcagatcaaagaaatatttgaaaagtacctataaagcacttaacagtaaccccctccaaatttccattgagggaaactgaagctctgaaaggaaagcaacttgcccagtgttgccctgctggtaaaatgcatcacccagcctggtacagtagctaagagctggagcactagagcaggaccacacaggctcagatcccagctctgccactttcttagcacgtggcctcaggcccatgtccttaaccataatgccctaccaagttttctgtggcataaaagaggatcacgttcacattaattcctcactctacagaaaactaagatgcccctgacttgtcccgttcaactccagttattctggtttcccctgaggctgccaactcagatagcaggttggatccccatcccttcagttataggtgcactgaaagacagtgggccttcctgtgcatcagccccagtgacggatcctggagacaccatggtgagcaaacccaactaggaagcttacaattcagtatggaggaagacattaaaaaaatactcaaactcattatttcaacaaacatttattgagcacctgctaagtgccaggcactgtggcaggcctgcaggaatacagtggtgaatgaaagcagaccatgtccctacccctcacggagcttacagtctagcggggcagagagtcatccagcaaccccctaataaagatataactacaaactgcgatcagtgcctttagaaaaggaaagaatgccctagaataagggtccctggcccaatctacagggtcaggcagggcttacttaaggatgctgaaaagcaaaacgagcaagtggggaggtaggggagtgagaggctgcttgggaacactgtgggagaggtgatgaatgcagtccccgacaaggtgagtttgaggaattatttgggccatcagtcaagtggagatgccgagtttggatacatgaagctaagggaagagccaggagaaagagaagggccagagagttaagaggaaaaccagcagagtgtggtctcaaggcaagggaagacaaagtgttttaagtaggagtggtcaaccacttcaagaggaaaactaaaaaaccacctgcagaatctggcagatgccgggggctaacacttacgggggtgagcaagtgcagaaggcaagtacaggcaactctgcaggggtcagcagtgaaggggagggtgatgaggtgctggccagaagcaggagggagagaacgtggggtcagcggagacagaagggatgctggcacaggcaaaggtgaatagaggatcaagcaaggagggcagcagaaaacctgccaggagagaaaaggtgactgatgatgtcagattctagagcaagtagcagaaactgggacccagagcacaggagggagaagtggcctgagcaagaagggactcctcgtcatctgtaacacaggggagggaaatcagcgtgcagacttgggggccacaagttatagggagttccattcttatggcttctgttttgttttttgaagcaggagagaaagtctgaaggtaaagaacatttgaaagagtcacttcagaggagaaacgagtggatcaaaaaaatatagtagaactgctaggcagggtggccgatgacccctcgactggtggcgatgttcatctgctctgccatgggacattctctaacaaagcttagcacgtgctgggctgatgagtgctatgaaaaagccaggggcccgaggacactggggtggacaggctcccctggggaagtcctcttagaactgagggatcaacactggaggagactgcaaggggtacgggataaatgttcctggtgaaggaaacagcaggggcaaaggccctgcagcagaaaggagcgaggccctttggagtaacagaaagaccatggtgacaggagctcagaaagaccactggtgttaagactatgagccagtggaggccagattggggaatgggatgggagggtgcttgaagaccatggtgaggctctcttggtctttacttttaagaagaataggacacttccaaagggtagtgtcaagtgccaaggaagatcaggagggcttttccccacaccagccctaggactttggactctgggagcctcagtttgctcatccaggaaagagaaatttaaaaccctctacttcacagggaatgttgtcggaattaaaccagaccttgcatgaaaatatagtactcagtgaagtgcctggcgaagagcaggggctcagccaggtctcatacaacaaatcctctgtactccatcccacaagccctgtgacatcttaggaccactctgcatctctttccctgctggaacctagcactgtgcccagcacacagtaggcagtcaataaatgcttgtcgatgaatcatctctaagctttagagttaccaaatgcctggtccagcaacccagggaaagcagccatttgggtttctgaactctatcctgatggctaccacggacttctcccatgccctcacctgatgtggctgtgctcagtgcacagagggcctacagccaacatttcctcaacaggaagccctctgatagggctcccacaggtaagggatataccctgagatcctccgccatttcccaagagggctaggtcacaaagggtggctagtcttcaacagtgctgcaagtcactggcagcacacaggttctaaaacaataatatgttgaaatgtactcaccaagaaagccaccgacctacaaagaaacccttatcgctgatcttgcaatgagcaccaacctcccctttgcaagagctgagatcgaaagataaagaagctatcaaaaagccatctgcccacttaaaataatatcacaagtcatgttaggaaccacagacctggggccagataccaaaacaattgtctgaacaggctgcttcaatttctccttaaaaccgcccatgtatgttaaaagaaaaacaccctctccacccaccttggccctgcaaggttttgatttctctgttctctgcctttcacactctttaaaatgaccaaactcctttacccaaactgtcgcatcttacagacagggttcccatgacagccggcggggatgacagcttgggaaagtgatagaaatgaaggtagctctggggtactggacctgctcagtatcttcatctgggtggtggctacacaagtgcatacatatgtacaaatccactgggctatacacagaatatcagtacactttatgtaggtatacctcgataaagcaaaaaaaaaaaaaaaggtaaaaggaaagcacgacatgctgggaacaccaagagtgaaatccagaatttgccctgaatcatgccacgctttctagaggaccagtttaaaaaaaaaaaaatagaaaaaaataaatgtccctagcatttcttccctggccctgtcactcactagctgagaggctttgagcaagctggctcatctctctgagctacctgtctcccctctactaaatggggataatcatagcacctacacaacacagcatgcacagcaggcctcacggagagaatggatctgatgttcatagcacagaaatcagtaaatgctggccagttatcttttgcagttaccaccatgcttcagttaccttgcccatgtttgctgcattcaatccaaccatgcaaagtgactgtcatttcccttagcagagaaggaaacggaggcaaggccacacagctgatgggcggagccgaatttaggagaggaatccaggaaactgtaggtgtggctccctaaatactgacactagctaacacctgtatgatactactttgagccagactcggttctgagcacctttactcttatcccgtaaagtagatgctataattctgttttacaggtgagggtcctgaggcatggtgtagttaaatgcgttggccaaggtcacaaggccagtaagtggcagcgccaggatttgaacccaggcaatctatgccagaatccacactcttaatgctgtaagaaaaaccatgctgcctgccccctttaaatgaagtctcagattatggtggggctcacaggtgggtgagtgggtacctgcctgcctgctcagttacccaggcacatctgcccaccagaccggagctagacctttctgaaccactcacagcctaaggccttaccagaaccagcagaacccacaaatgtcttactgcagccaggggcttctgaccaagcgtatacatacaaggtccaaaaagcattttcccatttccattcccagtcctcccaggaacagggaaatgtatacattttagggagaatctagtgatcctgggccagacttaggtgaccgcaaaaagaatcaggactagctgctgcccttaaagaactcatagcttgatagaggaaacctagggaaatcttctggggccccctggggtataactgattatttctccctgtccctaaatgatcacaggtggtgtggcaaaaaaacaagggacaaaaacttcaagtccagtacccatctggttctgtctctctgctagagccactgctttcttgtgagagcatgggctcagcccctcgcctccacaggactcaaaagtagattacagcgttaacagtagagtgcacaggcttcaaggtcaggcatgggtgaactggaagagccaggtgccatcactgcctcaaccagtttctccacctctggaatcctggtttcctgctctgtcagaaagagaatctgctctaccccccactggcaaagcccttggtccacactatgtcattgcagttctctccactccagcacactgctgatcattcacaccaagctcatttccaccccaggactttgcacttgctgtttcctctacctagaacacccttgttccatatatgcacataactgttattcatcatccaggacttagtttaaatgaaacctcctcagaaaagtcctccctgttccttttcctacaaactctcccccacctccccaccgtatctgcataactcttctttatcatcattcgggactcacctcctcaaaggccctccctttaacagcatgtctgacacagtcattccctcccaatctatccccttactcccttcagcagctaactttgtccctatttatcctatctgcttgcttgcttgttttttcaaactgtctcccataggagcctgtatgaatccttgagggtagggtagatgtctgtcttgttcagggctttacagtggaactcaataaatggaggaataaaaccccagttaaaacagtgcctagcacgtgtttgacctccatcactctttgactgactgactcaatgcaccctcctccctgtcctggagagcaggcctgaggggttcctgggccggaatgcttgtcctccatcccagacacagccctgcgttggcggaggtggcgctggctgacattacctgcgcctcaccggcttcatgcagctcttcagctgcctggcctcagcctccacgggaccctggcactcgggctgtggctccagctgcggcagctgctgctgctggggcagcccttcggcatcagtgggtgtgggagcgggtgcgatccggagcaggactgtgtagttgcggccgtggttgttggcccagaaagtgccctcaggggtctcatagcgcaccacgaagtcgaggcgcgccccatcgcccgcgccctcagcaaagggcagctggaaggcaaagcggtcggtgcggccgccgtcgtcgggcgaggaggcggatgcctggccgggacccaggccgagccccggatccaggatgggatctcctgctcctgttcctcccgctcctgcccacggcgggctgcgcgggacgtagcgcgctgggtggtcgcaaaaggaagcccagccgtcgtgtgaggcccgcacgtgcaccgccttctcgaaggagcggttcagcacgcgtaccaacccgcgcagcaccggcgggcggcccccaggcacccacaccccggcacccccggggaccgctccgggaggcggcagcagcgcctccagctccaccatgacgcgccccaagcgctccagacggcccggcgcgggcggcagcgaaaatgtggggaccaggtaaaaccccccgccagcggggacggggcacagcggtgagggctcggggcaagcctcctcttcctcctccccttcatccccatcctcgccatcgtcgtcctcgtcggccccgccgccgccgccgccatcttgcccggccgccgccgccatcttgcccgccccgggcccgccccacggccggtagcggcgcaactgcgccagcggcagccccaaggcctcgtcggcgaacagcaccctccgcggggccaccgccgcctcgaccgaggtgcggggctcacccgcggccggcgaggggggcgcggaatgccgcagcgggggctccacaggggccgtacgcgccatatcggcggcggcggcggcaccgacggcaccggcggcgggaccggcgggggcagggcctgaaggggcgggcagccaatgggaaggccagcgcggaggggtacggctcacgggggcataggcggtgagatgaagacaagtattgcagagggccaatgggcagccatgcacggatgacgtacagcgaattgagagccggagaagcacgcagccaatggggatgcccgggagtgggcggtgtagggggcgggatgatcgaggaatcaatggagaggccggaatgggggtggtgcgaaatccatgatgaagaaaacagaagcagacagctaatgcggaagtctgagcgagagaggcatgtgggcggtgggaaaagtggaatggctacaggcgatgagggcagccgggaacgaacgcagaggcccaaaaagtgggagatcccgcgggttgcgtaggcggtggaacggtagctagagagagagaacagccaatggagagccacgcgtgggatgacgacaatggctgcagcgagccaatggggaggcttgtgagcgtgcactgcggcttcgaaggggtggtgccaaggtggagctagccaatacgaaggctaaaaggagaccaagaggcgggtgtgtagggagccgagccaatggaggtggaggctgaaggcgggagcgaggacgagagctggcggatagccaatgagggagccagggtgaaggcgtagagacctcaaaggacagtactagtatgggatgagccaatgccgaggctagatagtgcagcgggacggagggaggacttggaggcaagatggggaaaaaagcagagccgacgggggcagtgtaggtggtgtgaagggaggcatgagtagccaataaggaggctggagaggaggacgctgtgtagacagagtctgaggtattgggtggccggacagcagaaccatagaacgcaggcagccattaggaaaaatgtgcttctcagggatggggttaccctctccctaaccctccgtgactccccattgccccaggaatacccagagcccctgaaggcctagaccacaccttggtgtgtgaactaggaaagtgaaaatgactgtcctgttgcagttagttacttactgggtcctccctgcccaactacaaccttttcttgagcagtgccacaagccaagaatgcccctgattgttagccgcaagcactctccaggacttgatactattgttgaatgaatggccgaataggaaatttaactttctgaaggattcacttttttaaatttcagctcagcaaacactgacctgactgtgtgctaccagaagttgattgggcatatgggtagcttctgactaatggaatcacaatcaaagccctgtccttcttgcccaacctgacactccacaccccacaggggcctcacctcccttctttctgtccccccatctctgcttctactgttccctctcccaagagtgctgttccttctgctgcttccatctagtaaactcctttcgctctccctttggggtctcaccttctgtgggaactcaactgcagcttttgtccgctgaacacatccattcatacattccttctccatcctgggaagatttactgaacacctactgagtgccaggttctgagcatgctgttatctcattagaacctcacagcatcctaggagggaggtgatccttccagcagcccctctccccaggtctccatgttcaggatgtccatgagttagaaatgaatatgttcagctgcaagtaacagaaaaatcataaaataatgggggcttaagcaagacagaactttatttttttctcacctaaaagttcaagctggcaaatagtccagggactccttcctgcccacctggtttgggcattgtctgtcccgatctggctccaagactctcagtcttcaacaaatccttttggctgtctattaaaaatatttaccaaatccatcctcttctcaccacctccactgccagcactatcaccagtcacctagactactgcagtagccagctccttgctggtcccctgcttccacattcaggccctagaccccattgtacactcagcattcaggggcttcctgttaaatcctaacacggtttgtgtttctcctctgcttgcaaccctgtcatgccttcctcctcactcagcgttgaagccaaagtccttaccatggcctacaaggtcctgcgtggtctaacctccgagtcccctttctgacctcacctccagcttctcttcttgctctctccacactaaccacaccagcccccttgtagaccttgaacaaatcaggtacattcccacctcaggacctttgccctggctgtttcctttggagttcctcagatatctagctggctccctccctcatctccttcaagtctttgtcagaggcccctgtctctggggacttttcctgacccgtttaatcttgcctactcacccccaactcccagccctcccagtctccttcccgagaagccctccatgagagaggatatagtccagtatagaggggaggtagcgacctctacccctctctgccctcctgaccccagcccccattctgcaaggatcttggctttcagcagccgtagcatttccctctcacaccctgggcctgcccaaggggccagctcacattctcggccaccatcctcacttcgtttgcctcctatatctctggccactctctttcatggagtgagtgacagtaagggacagatggtctggggaaggtataaggagaatgcagcccacacctctgatcctgagagagaaaactagcccccttttccaggagggggacaggtgctggggcagggaacaatgcctctgctgatagaactggcctggtttataattacgcaggaggtgtagggaacattccgacccaagtctgcagggagcaaggggttattaactatgggaacatcagtgcaagggatcattaaccttaggaccatcactgcaaggggtcattaaccttggggccatcactagaatcagctccccaggactccttcctgacatgcatgctcctcaccccctcccttgctccctcccacatgccgtgacatctgttaaacacctgctgttcacagggtccctgcaggcctccaagcaggggacctcatcccaccttggtgcctcccctggctgtccaacacacccaagccatttttgggtctcagatgtgtcccaccaactcagaagcctcaaccagcgaaagttttgttttgaactaatggtggggagggttgggtgttttttttttttttttaattgttgttggctgatttttttaaggtctttttttttctattctttttttttttttttcttgtcttcacaaagccaggccatcaggcccattctgggcttttccagaagggtgagtctgagttgaggaaagaggccctcctttttacgagggcttagaaggttgggggaggaaagggggcaaaggggtgaaggggtggatcttggccaccagatttgtaccatgtaaataaaaagccctttccaatttctcttccccaggtctgaagccagtcttgtagagggctggagtggttgttggacgactagaaccctgggctttgcagggtgctgggagctggaagtcttcaccatggcctgtcaggagaagcccctgggggctggtctaccatgctgaccagtggttgaatagagtgcctgctgaggtcaagagatgcagccgccaattcctggacaacctaaaagcctcacaagcttcaagtctccaaggactctccaaatcccaggatctccctgccatcacatcctagaatttaaaacctgagaacatcaagttcaggaaagcttggggatttcaaagcccagcaccaaagaaagcgggacccacactcgccagctctgtgatcttgggcaagttgcttgactacttatacctccgtttccctcatctgtataacaggaatacaataatgatgagatggagctcaaggggccatggtgaggattgaacatgatcacttgtgagacatgttcagcactgtatctgacccatggaaaattcaagataaacatcagctactgagatgatggcggatatttggaatcctaaatccttggaaactggggctttttgaagtaaaagaccccaaaggctgagggcctcagaagcatcaggccatgatgttcctgaaacaagagggtcagggtcccaatgggcctctggggttcatcgtgaggatggatgcattaatattggggacctgctagggaccttcccagtgggacagtggctgggtcagggcactcaagccctaaaacgtgatgaggcgagacttttctctctttcctcattcagtaactgtcagtagattctgggagccagggattctccgactcttcaagtccatgaattttaggggatgacagtgggctctccgctttctcctccatgaagtaacttacatgcccctcaccctctgtgggaggggtgttgcagggggtgcagaactcccctcgccgggtagttcaagcaatggggaccatatcaattccatctatagggaaactgaggcctggagtagggcgaggcctctgggaacccagccctattctgtctctttccctggcatttcccatccacacatagagcttcagattctctttctttccccagagaccctcaaatatcctctcactcacagaatggtgtctctgcctgcctcgggttggccctgtgatttattttagttcttttcccttgttttttttttttcaaactctatacacttttgttttaaaaactgtggtttctcatgagccctattatctcattgatacctctcacctctgtggtgaggggaagaaatcatattttcagatgactcgtaaagggcaaagaaaaaaacccaaaatttcaaaatttccgtttaagtctcataatcaagaaaaggagaaacacagagagagagaaaaaaaaaactatgagaacccccccccaccccgtgattatcagcgcacacactcatcgaaaaaaatttggattattagaagagagaggtctgcggcttccacaccgtacagcgtggtttttcttctcggtataaaagcaaagttgtttttgatacgtgacagtttcccacaagccaggctgatccttttctgtcagtccacttcaccaaggtgagtgtccctgctctcccctaccagatgtgggccccattggaggagatggcagggaggtaggcacggcgggggggtcaggggccctctggtacagtgggatgtacccagctaccgtgattccagccaggtaaggtctttaaaaaaataataatagaataaatggcagaagacttaaaggtgaagtacttaatgcatgggcaggggcaaaaataaatgaattcatcaattgatacgtagatggataggatttttaaaatatgtcagctgccagtctttatggatttcagagctttgaacaacttgaaatgctgtccaggtgcaactgaaaatttcaactgcatctctctcatctctttgtctcttagctcttgatgcctctcatccttctctgtctctctgctcaccctgtcttgctcttttacatgtttctctgcctctctttctcccgccatctgtctgtcgctacactcagactctctttccccgcatctctcctggcctctgaccatctcccctatctctgtctcctccatcttgaccacactccatcgatctcctttcctccatctctcccgctctcttttcttgccttcccccacctgccttcccagccagcatccagcctagagctttgtacacagctggcgtttaataatagtaatgtcgccgaggacctttacattttatgagagtgagcatcagttctgttcaccctagtagcaggaggattgcaaggtgccggggcaagctgagcacttaactgaactttgcttgtatcgctttagaggagacccttggggcgggggggcagggagcacttcacaccattgtcaaccgtagtttagctgtgtggacctaccccaggactgcatgtgtgtgaccagagtccatattcaggaagcaaacaggttgttcagggctggggtgagctcgattctgcaggcttagcacagcgtttggcacaaagtaagtgctcacgaagtgttagctattagtatttctgtaaccaaattagaatcatgctatatattggttttgttcctgctttattcaattaacagtagtgtttttgaagcttactaaaaattgtttgaacacatgatctttcatgatggacaagactgtcctcacatcagcatgaactttgattgatttgaccaagtgccgattgttggacattccggttgtttctcgtttttttctataaacatccctgactgcttccttggattcctgaaaagggagttgctggggcaaagggggcgtgcatttttaaagtttatgaccctctctgctaattctccttccaaaaggttgtcctattttatgctccctctacttaagctaaccctaggtgagtattattatgttttaattatttcccaacatgacaggtaagaaaaacacattatcacattgttgaaatttgcatcttgtgattacttttactattcattggccattcatgcttttttttttttttttttttggttgtctggtcatgtccttactcctaatagggtgttcatcttatttttcccttattgatttgccacagctctttatttggaatggttattaacctttcatcagccattacatatatagcaaatattttccccaattcatcatttgctttttttctatttgtttatggtgttttttgtgatgcttatgatggttttatacagtcaaataggttagtctttttttctgtggcttctgtctctggttttgtgcttagaaagtcctttcctacttgaaaatgagataaatgttcacctatgttggcttctagtctcttttatggcttcattttttccatttactatagaggttaagagtgtgggtactggagccagactgtctgggacaaacccagcgtcaccccaagccctatgtgtgatttttagccaggcacttaacctctccatacctccatttcctcatatgtactgcaatggttataatagtaccttcctcaggagtctttgtttagattaaaatttttaaccacagtaaatacttagcacaaggcctgacacacaataaacccaagatcagcattaggtgttaaaacttatatcttgaatggatctgggcattttagggtatatgatgatggtgacatttcaaactgggcagggaggggttgttgggataatggactgactattcactcaataactttatcttctccctaattatctcagacacatttgttaaaccatactccatggtcctccagtttgaaatgccacattcatcacaaattcagttctctccatatgtgggtccatgtccaagctttctattctgttctcttccccagtatctgttcttataccagggccacactgttttgctgattgttgctttgcaatacaattcaatacccagccatgggtgtccctggcaccttgcccttctttattcttgattatttcaggcagcatcagttgaaccagccagagaccagcaaatgttcttatttgaggcaatcctcctctcgcacacatgcactctggctctccatgcatgtgtccatttctctcaatgtctctcactatctcttgttctctcttgctcgctctttgtgtgtgtctctttgtctctatgtatccctatctctcagccagtcccctggatagaggggcaattgtcaacttgaagccctgcagacacctaatgacttaaccagacagcgtagaagggccctggcccttgtctactccacgcctctccgtgctcagtgtagaagggcaaattgaagaccagagatctcagggcctcaccgaaatgcagcggcagagttgaaatccaagcctagatctcaggactctaggtgggaccctggttctggctctctccccaactgaaggcctcagtttacccctcagcacccagaagggggaaggggaacctgggctaccattcccccttctgccttctcacacgttggaccccaacttcccacaggttggacgatccacgatcacagtgtggggcccagcctcacaagagctgggctaggtgaggccccggactccataggtcaggaggcctagttggccagagcgtggtgatgatggaggcatgtcagtcagtcaggctgtgtgtccccagagctggtgctggtccccgaaaaccttgattgtggggcccctctagagagtctgatgatgggctctgtattggcgaaggctgaggcttttccagctccccccatgaggcccagaccaaaggcacaccagcctcaacctcctcctccccctgttgccatctctggcggagtggccatgtatttgggaacgttgttccagagtggacagggagactgaggccctagggaggctggctctgtttccaggcctggtaggcaagaggccctatgaagcagcaagctgcctgactttcagatggttccaaggagtttggacaccagggacactggcctacacatactgagactttgggaccgtagaccccacagtctgtggttttgagattctaggatcctttaaatctaagaaatgctgttctatgattctgaggtcctggtgttatactatttgaagaccccaggggtcccagtatctgtggagcctgcctggcactctcagagcttcaaacctgggtcctctccacaacccaagaagggccaggtcttcagagctaggggcttgtcatagtggccagatggacatcacctaccacatccaccagcacccatgtcaccccacctgggccaagcctgctgcaggacagggcagccagttctcggaacgaaacctgtggggtggggtatctgccctcttctcttcctccgtggtgtcgatgaagcccggcgcatccggccgccatgacgtcaatggcggaaaaatctgggcaagtcgggggctgtgacaacagggcccagatgcagaccccgatatgaaaacataatctgtgtcccagaaacatcccccattcagcttctgagaaacccagtcagaaagggacgtcccaacagacagtgcaggaagccggctgcccagcccggccctctaggtcctctacccccagacagatcatctccatgtccctgtctgagaatgtatctatgctttgctgagtcaggccatcccacatgtgtttggggagaattcttagctctggccaagtgtccaggcagcttcagaagtgaccacaggccagccacatgggccaggccagagtggtggaaaacatccatttgcaccgaaatcggtattagtttgttctggctgctataacaaagtaccacaactgagtggcttcagcaacagaaattgatcatctcacagttctggaggccagagtccaagatcaaggtgttgccagggttggttccttctgggggccataagggagaagctgctccaggcctctcccccagcttctggtggttgctggcaatctttgttatttcttggcttgaaggagcatcaccccatctctggcttcattcattcactcaccttctcatctcaccagtgctctcccaggcccttgttcggagcctccacagacccacactcctgtttctcacgcagtaatgttctaagcccccaggagactaagaacttaatacctggattctcacactcatctccctcagcaccacagctctgacaaccacccccaggaggtgacagcaaagaaaggaaggagcaactgctcccccagaacccttctatactcccccgggctgctctcagcagctgtgtgcccaactcagtgctgtgaggtggaacggggagatggagacacacacacacacacaccagagagtttataaaatgtgcacacggaaacacttcctaaagaaagaagtggagttctcaagtcactatgggactacggaactcggcatctgagcatccccttctgtataatggggttggctgggcagtcccttccagctctggcttcctctcagaccaggattataggatcctgaaaagccagtgcttccctcagggagtggaaggttctggggctcagcagggggcccggagccattgtggagggctttcaaggtgaggacaatagaagagcaggtcttgcgtggcttggacagggaaagaggagaaggagtgggcatttgaggcagggggtgtagcatgagccaggcttgagggccagaaattggggtgaactctgatgggggctgggtagagaagcttctacaggccccagctcaagagaccccatctctcctcctctctgtcacttgccatgctggatccgtgcatgatcacactcctggactcgcctccttgccctgagatccagacccccgtattcagctgccccctcagctcctccactcacatatttaatgccagactcttcatgtctatctacacctgcacttttgcacccaatccaactccccgccatgtcccccatctcaggtaatgtcagctcggtccttccagctgctcaagctaaaacccatgtcactttgactctccctcttgcccactacatccaagctgctagcactgctcctgatccagcttcagattaagtctcagaatctacccacttctcgccttctccactgccaccagcccattctgtgccagcatcatcacttgccaggactgttacaatagcctcctcactagccccactcacagcagccagatgaatcttttgagtccatgcctagtcactggggcaaaataggactccgaggagaaagtccgagaccagctccggcaagatgagcaaacacagcctgtgcagggtgcagggagggctagaggcctgaggcttgaaacagctctcaagtggagggggaaacaaccattgccctcatagaggacacatccacaccagggctgtgctagcgtgggcaggcaagccaggtgctggacctctgcacgtggggcatgtgtgggtatgtacatgtacctgtgttcttggtgtgtgtgtgtgtgtgtgtgtgtgtgtgtgtctagagctggggtgcaactatggggcccctcgggacatgtcccagccaatgcctgctttgaccagaggagtgtccacgtggctcaggtggtcgagtatctcataccgccctagcacacgtgtgactcctttcccctattgtctacgcagcctgcccttggacaaggacccgatgcccaaccccaggcctggcaagccctcggccccttccttggcccttggcccatccccaggagcctcgcccagctggagggctgcacccaaagcctcagacctgctgggggcccggggcccagggggaaccttccagggccgagatcttcgaggcggggcccatgcctcctcttcttccttgaaccccatgccaccatcgcagctgcaggtgaggccctgggcccaggatggggcaggcagggtggggtacctggacctacaggtgccgacctttactgtggcactgggcgggaggggggctggctggggcacaggaagtggtttctgggtcccaggcaagtctgtgacttatgcagatgttgcagggccaagaaaatccccacctgccaggcctcagagattggaggctctccccgacctcccaatccctgtctcaggagaggaggaggccgtattgtagtcccatgagcatagctatgtgtccccatccccatgtgacaagagaagaggactggggccaagtaggtgaggtgacagggctgaggccagctctgcaacttattagctgtttgatctttaaaaagttactcgatctccatgagcctcagtttccatacgtgtaaaagggggatgatcatagcatctaccatgtgggcttgcagtgcagagtatttgaattagacacagaacagtgaggatcaggatggcctctcacccacctgcctttctgcccagctgcccacactgcccctagtcatggtggcaccctccggggcacggctgggccccttgccccacttacaggcactcctccaggacaggccacatttcatgcaccaggtatggacggtgaatgggcagggaggagggagcaggtgggagaactgtggggaggggccccgagtcaggctgaaccacagcccacatgtgccccccagctctcaacggtggatgcccacgcccggacccctgtgctgcaggtgcaccccctggagagcccagccatgatcagcctcacaccacccaccaccgccactggggtcttctccctcaaggcccggcctggcctcccacctggtaacacctcagcccgtaccccatggcttcacagaacccccaagtccccagatccttggctgtgagcagtgtaggctattctgaattgcagtactctgggggtcaaaggtgtcaggtctcagaggcttggaaactccaccctccaaaaaacgtcaggtgcagaaccttaaagatgcagaatgtcaaaatcacaaaaccacagagctttacaaagctagtcaaaatgtcagcacctgcgaatggccgtctttaagcttctctgccagaagcctgggactttggggacagcagagccccctgggagtcagggttttcgaggctcaggagggtgggaagctcaaaatgagaggccttgtgggccaagctccagagcccagcccacagcctccataggtgccctgtccccacccacagggatcaacgtggccagcctggaatgggtgtccagggagccggcactgctctgcaccttcccaaatcccagtgcacccaggaaggacaggtcagtggacagggctgggaaggatcctcgccctcctatcccctcccctgacaccctctgtccccccagcaccctttcggctgtgccccagagctcctacccactgctggcaaatggtgtctgcaagtggcccggatgtgagaaggtcttcgaagagccagaggacttcctcaagtgagtggcccaggcctgtgccagtctaccggccctggcttgtggggagaggtctagggtgcagatctcagctcaggcttcatcccaataagtagtaagatgcaagagctaaactctgagactgtgggttcaaatcccagctccatccctgactggctgtgtgaccttggacaaattacttagcttctctcgacctcagttttctcgtatgtataataagaaacgtttgtgctgttatttacccccattttacagacaaggagactgaggccaaagaggttaagtgtcttgatcaaaatctcccagttcctgagtgacagagctgggatttgaacccatgtagccaggctctagaatctgcactcctgctttgccctgctactcctcatgccaacatgccagccttattccactgttcccaaagttctagctcctctagatggctgctgctgcctcccctcagtccccccatatgtctctctctctctctctctctctctctctctctctctctctctctctctctttctctctctctcacacacacacacacacaaatacacaccacactacacacaacccttagcagcaaccccacatgtcctgtcctccttgcagccaggcctttgcacaggccgtccctccacccagaatgctttgcccactctcacctccctggcccattctcaactcaccacacttccaacattatctccagcactctggccaggctcaagtggtgagttcaggcctgacatgcagtaggtgctgaggggcatgtgttaagggaacgaggggtgtgagagggagactgaggtagagaggggaggggagctggggctcagaggagagaactcccagagggtctgggccctccccattcagagcattgagccagaccaggcctgtcgtggtcacctgcatggaatcttctccctacttaggcactgccaggcggaccatcttctggatgagaagggcagggcacaatgtctcctccagagagagatggtacagtctctggagcagcaggtaatgccagggcggtggagggtaagggatagggatagtgcgcaaaaccttctgtccaccatgtgccagaaaccaagttcacctgggacgagggctggtataaaggaaggaagaggagcgggcactcccagggaagaccgtagcctgggcaaagatgtggcagagaagggccaggctgaggcctcatgtttgtgccatttcacagctggtgctggagaaggagaagctgagtgccatgcaggcccacctggctgggaaaatggcactgaccaaggcttcatctgtggtgagcgaccccaggactggtggtggcagactcagactgctggggggcagggaggaggtctgcacggtgcagggaacctaacctcacattcaggtcctgagagctaggggcccctgtccccagctccaaacatgcccagacctggaaatctgtccccttctacttacaaaccctctgaccccggctgggcgtggtggctcacgcctgtaatcccagcactttgggaggccgaggcgggtggatcacgaggtcaggagttcaagaccagcctcgccaagatggtgaaaccctgtgtctactaaaagtacaaaaaattagccaggcgtggtggcaggtgtctgtagtcccaactacttgggaggctgaggcagagaattgcttgaacctgggaggcggagtttgcagtgagctgagatcataccactgcactccagcctaggcgacagatcaagactccgtctcaagaaaaaaaaaaaaaaaaaaccctctgactctaagatccccaaacactgtgatcctgagttgttaaagcaaatgcaaatagccagacttgccagatgcaggctgtgtgccagcaggaccagctatgtaacctgcagggccccttgttcagatttcaagatggcgaccacagagcattaaacaaagcacagggtgccacataaccacataggtcacacgcccatgaagccagccctggaggccaggcactgtttctgagcgctttgctggtggtaatttatttctcatgatgcgaatgtacagatgaggaatattgaggccaggggggtttaggtgactttcccaaggtcacagttgggtggtaaagagccctattcaaccccagttcatggtcccagcatcagtggccacatacgacatccgcacctgtgctctaataaatacggctcatgctgttttgtgggattccacctcagactggaatttagaagagggcgtccttgctttgaaaaacactgatttaaaaataaagtggagccaggcgcagtggctcatgcctgtaatcccagcactttgggaggctgaagcgggtggatcacatgaggtcaggagttcgagaccagcctggctaacatggtgaaaccccatctctaccaaaaatacaaaaattagctgggcgtagtgacgggcacctgtagtcccagctactcgggaggctgaggcagaagacttgcttgaatctgggaggtgggggttgcagtgagccgagattgcaccactgcactccagcctgggcgacagagcaagactcagtatcaaaaaaaataaaaaacataaaatagaaagtaaaaagtgggaagtttaagcctctgggtcaccagcctctccccctcacccaggcatcatccgacaagggctcctgctgcatcgtagctgctggcagccaaggccctgtcgtcccagcctggtctggcccccgggaggcccctgacagcctgtttgctgtccggaggcacctgtggggtagccatggaaacagcacattcccaggtaagaatggtccttgcactacacggtgcccccaagctcctaatcctgacaggctctgggtggagggtgcaaaggagctccatgctgccccttcccaccaccaccaccactgcagctgccgccactcagcctttgggaaaatgcatccgctcacaaaagcttcctttcgggatgtccgtggcctgaaagccccccatatggtctcgagtgtcgggcccctagccctgactcccttggggattggggccatgcctcacccactctggactccagctactatattcggccatcagaagggagggaccctgctaagtaattccaggagcacctcctttcctcccctgaccaaggaaaatcggggtggattcgcccgagctcacctatccactgctctccaccaggcctggcctgtgggcttagcagggatcagagaccttgactgtcatcctggctctgccatttaacctcttgcatcctttggtgtgcaagttactccgcttcttttcaacctcggggagaactattttggcagaagtggtgcaaagaataaatgatacaacttatgtcaggtgctcagcaaacagtacctgtgcccgtggacacgggtgttgacggtgagatctcaggcctgtagactcaccttgtagggggaggggacagggagctagctaggaggtcctgcatggggcttgattcatccccaccctctgacagagttcctccacaacatggactacttcaagttccacaacatgcgaccccctttcacctacgccacgctcatccgctgggtaagcagggcagctcggccccaaggaggaggaagacaaagatggggtgggggacctgcctcccaaactcctgtctccctctgagtgccctcagagtgggttcctccattcccaagccccagccccaaggatccccaagccgtgcctcaaatgtgacccctcatgctggcttcaccccaaacctgtccgcaaatccaaacctaaaccaccatccaggccagagcatgccaaattctgaccctaaacctacccctttccagatgtccacctcagccccatacctaaccctctcctggacccataaaatagcctaaagctaaccccatctctgcaccttgccctaaacgtaccccagctcttactctaactccttccccagcctttatgccaacccaaccccatctccttccctggccccaacgtaccccagtatgtcaatacacccccaactgggcaccattcccaacctttccttgtaacacccatttgatccttaacttcatcaccccatcccaactccttcatctcagcctccccaatgccttctcagaaccttcatcctagcgccacacctaaccccaaacctgaacctcacccctacatgataccagatattccccgactgtctctgaactgaaaccctgacctagccccatcctgactgatagcctcactgcaatcatcatcgctgactctgtaatcccattcctgaatccaaactgatcaaattccctgaccctcagcctcactccacaccgaaccccacaactaacctcatccttgccctgagcctaaccacctaaccatgtccctgacacgtaagatactcgataattcaaaccatctctggcttctgacctaaagccaagtcatcccatccctcacccctagaccccccacctgagtccaccccagcctgactcttaacccaccccttccctgacccttaagttggcctggccctttaccccttccaaatccttgaccccacttctgacccttcaccttccccaaccctgaaatgtcacctccacagagaaccccaactccaactccatcccagacctttcacctcacttcagccctagccctgaacaagaccccactcccaacctcagtcctgatcccttacctaatcccagaacaaccatacccacacccatctaaccctgcccaacccgacacttcaccccttttctaaccccatctttgaccccatgcttcaccccacatctagtcctgtccctgattacctgcccctacaattccgcccccatgtcagatggctcggggtaggtcatagcccctctaaaccccaagtttggggaatgtgccccttaccccaccccccaacttccaggccatcctggaggctccagagaagcagcggacactcaatgagatctaccactggttcacacgcatgtttgccttcttcagaaaccatcctgccacctggaaggtgagctcctctgaggtggcggtgactgggatggcctcaagtgccatcgcagctcaaagtgggcaggcctgggtctgggctcataggcacattggggaggaacgggatgtgggttgttggtggtggctgctggcctcagaggttgacgcccacctgctccctgtccccggccttccacagaacgccatccgccacaacctgagtctgcacaagtgctttgtgcgggtggagagcgagaagggggctgtgtggaccgtggatgagctggagttccgcaagaaacggagccagaggcccagcaggtgttccaaccctacacctggcccctgacctcaagatcaaggaaaggaggatggacgaacaggggccaaactggtgggaggcagaggtggtgggggcagggatgataggccctggatgtgcccacagggaccaagaagtgaggtttccactgtcttgcctgccagggcccctgttcccccgctggcagccaccccctcccccatcatatcctttgccccaaggctgctcagaggggccccggtcctggccccagcccccacctccgccccagacacaccccccagtcgagccctgcagccaaacagagccttcacaaccagccacacagagcctgcctcagctgctcgcacagattacttcagggctggaaaagtcacacagacacacaaaatgtcacaatcctgtccctcactcaacacaaaccccaaaacacagagagcctgcctcagtacactcaaacaacctcaaagctgcatcatcacacaatcacacacaagcacagccctgacaacccacacaccccaaggcacgcacccacagccagcctcagggcccacaggggcactgtcaacacaggggtgtgcccagaggcctacacagaagcagcgtcagtaccctcaggatctgaggtcccaacacgtgctcgctcacacacacggcctgttagaattcacctgtgtatctcacgcatatgcacacgcacagccccccagtgggtctcttgagtcccgtgcagacacacacagccacacacactgccttgccaaaaataccccgtgtctcccctgccactcacctcactcccattccctgagccctgatccatgcctcagcttagactgcagaggaactactcatttatttgggatccaaggcccccaacccacagtaccgtccccaataaactgcagccgagctccccacatgctggactatcaccccatataagggttgcggtcagtgggcaggggtctgggtccaaggccgcagcaggaggaactggacagcggaggaagtagctagggcatgtgcttggccactgcctccagcaccccaaatccctgcctgaggctggggagagacctctgccggcggctcctcaggcctcccggacccggcctaggaggccagcgttctcctggcggagggctcggtagtcctcccggatcttctccaggttgctgagggtcttcttgcccagctctgtctcgatctgaggcaatgtgaacacatgccccctcagcacacacagcccctttcccagctcctgctcaccagcccccatcacagccactctgggcccctcccaccaactccaacagcctgctctgtcccatggccaggcctcgtgtggtgttccctctacccaaagcatccttcgccatgtggcaggattccccctacatctttaagctgaagcctctgcccatggccctgggaggcagacaggagggcccttggggtggaagctggggctcacagtaggccacttgcctgtcccaggtcacaggcactaaggggcagggctgggtgtccagccatcggctgtgtgtggctccacagcctctgtcagcataacctgaggaactgtccccccggcccgccttggctccccatcctgcccccaggcctcacctgctcctcgaggtctcgaacctcccgcatgatggtgcctgtgtcctcgatggtctggatgagctggctgcagttctggggacaacaggagcagaaggcttgcacccagtcccacccacccccagcagccccaccccaggcacatgtctcccctcacctcgtgcagagcagctagatacttataggccttccgaacagcatcgtccttcttggcatcctgaccagacacagggacctcaaaggtatcagtgggctgcccttgaccatctccatgccctaagaaggccaccctctcccaccaccccactagcttcatcctccatgaaacaaagccagccctgggtatcagtgcacctccagcctcgcacagggcctgggtctggaccccagccagccaattagcagatgcacaaggcagcagcccagcctcaccccactcacccccgcccaacctgccccacaccttgaacacaagctcatcagtcaccgcaaacgtccggtccagcttcccagatagggagttgatttccttctgaagctccttcgtatcagacaagatctggcagacaccatggcagccatgagcccctgcctggggcaggctggctagcagtggagggtcctcatgtgtaccagacagggactgtgtcactgtgtcaggggtgactgggatggattgtgtgtgactattctgtgttagagtgtgactggacagctctgcctgagggtgtgaggtccctgtgcggccacactatgcctgacagcccacatgacccaccctccatggccctggcagtgtaccttggtgatctcttccttctgcttccggatgttgcccacgatctccaggatgcgctgggtgtaggccagccgggacacatctctgggcagagtctccagctctgacatctaggcagggatatagcaggcactgccccaggaccatccccccaccctcctaagctacccaggtccctcacacaggccttaccagctgcttatagacctcctccttcctgcgggcctcttcagcagccgcccggacactctggtgcagttcttggatctctgccagccgtcgagaagattccagctgccatgagcccacaggcagaagacagtgagcagagcatagggatggccccctagagagggaccgagcctgccctggcccgcccacagcccagggccccactgcttacctctctgcaatcctgcagctttcggaggtggcggtactcagcgaggagtgggacccggtgcttctcccactgacccgccaagtggatgacccgctgggcactattctccaccacaagctggtgggggatgggtacatgtcacacaggctgggccctccaaccccaccccaccccaccctgcccctctccgcccagctacagccccaaccccacctgcagcttggcaaggttggcagtcccatcgggcagcagctccaccgcgcggctcttcaggcgcagggcctgctcacgctctgctgtactgagcttgctgtgccggcactcagactctgcctggccggtggatacccagtcacatgccacagcccccatggagctccacagatgactgtacacccctgtggcccccacaggcctctctaacagctccacgctggtgccaaggaccccgaggaccccctaatcccctgtccatgcagacccgtgggtaccccacagatgcccacagaccctccgaggacccctcaatcccctgcccatgcagacccgcggtgccccatagatgcccacagaccctcaccctggcctgattctcatagccaccctcaagaggcccacagatccctaatggctcccaggaacccttctgccatgtgcagacctctacagagcacctcttgccccatctagtccctcacaccccgaggccctccttctgacctagcccaacgcgcagcccctcctccgccccttacctgcacaaagctgacgcccagggtcttcatgtcggcctcaacctcctcaatgctgcggttcactccttccagctgctcccgaagggactcgagctcctgttcctgagctgcccacgtgacctgggaggcccaggccagtcagggttggggtgtcaggcccagtagacaagcaagggcctgggacacccccctccaaaccactctgctcacctgttcaggccgccgggaggtggctggcacatctgacacctgagtggcctgggcctggggctcctaaggggagtgacgaggggcatcctggctgccagggaaggcccttcctcacgtggcccagcctcagcctcccctgagaactgcccccagtgcggcatgcatgcccactgaagcaccgatggtggccagactgtgactatgtgggtaaaggcaccatctgcaacctcgggccagagtgcttgctcgtggagaaatctccctgaccctgtcacagctcctacccacctgccccatctctcaagcctcaaatgcccatgagaaggatggggggccctcagagtgaacatcttaggacagaagatatgctcaaaggaaactgcctgaggaaagggggtgttgccccaagaacacccccacacctttgcatggttcccacctatccacattttctccagtcaagtccctaataagctaggggacccctctgggtacccatcccacagtggggcgagggcctgtccagtgggaacacaggaacctgtgtggataaaggtgtggtgctgacacaaaaagccaccctccaagcctgccacgcccatccacacatctcatgtcctcaggcgcacccaccagatggaaggtgaacttctctgagtgcgtgaagcgggagcccttaggagcaccagtcttggccccagcaccccaggcctgcagcagttctcccaggtcccgggcttgtatgggggccccaagcaggccccagctttggcgcagatgctcagtcagttgcttctgcagccgctgccgctgagcccgtgtgtcctcctggggagaaaaggcgggggaagcaggaaggtgtaggggcccacctagcacccaaggccctgcctcctccaaggaccccctgacaagagtatacagacaagtcacccccaccctccagccttcccactaaggcaggccctgctctactctcctgctccaccagcctgggatctcctcgaggacaggggtctcctcttgctcacagacatacttctctccacccactagatccccatgctggagaaggatgtgggaagagaggggggtgggcctagagcccccaaatccaagagaagcatagacaggatatcgggggacagggcagagacagggaatcaaaggtaccaagcacagaaagaggcagagagagagaggcaagagagggacaacagagtttcaagataatgggaaaatctgattatgaactcaagtattggatggtattaagatatcattgttggccgggtacagtggctcatgcctataatcctagccctttgaaaggccaaggtaggtagatcacctgaggtcaggagatcaagaccagcctggccaacatggtaaaaccccgactctactaaaaatacaaaacttagtgtgctcctgtaattccagctacttgggggctgaggcaggagaatggcttgaacccaggaagtggaggttgcagtgaagcgacatcacgccattgcactccagcctgggcaacagagagagactccgtctcaaaaacaaaacaaaaaaaaacaaaaaacaaaacaaaacaaaacaaaaaaaaacccacaagatattattgttaacttcattagccatgaaaatggtccagtggttaccttgaaaactgaatgtccttatgagttaagagatgtagtcctaagtatttagagctgaaatgacatgatgtctgagatttgctttaaaataatacagcaacaaagaaaaagttgggagagaaaagatgaagaaaagttggcaaaatggtacataggattcactagaatattctctctacatttatgtttgaaaattactacagatataaaaacaaaaacagacagccaggcgtggtggctcacgcctgtaatcacaacactttgggaggccgaggcagatggatcatgaggtcaagagatcgagaccatcctggccaacatggtgaaaccctgtctctactaaaaatacaaaaattagctgggcgtggtggtgcatgcctgtagtcctagctatgtgggaggctgaggcaggagaatcacttgaacccaggaggcagaggttgcagtgagctgagatcgtaccactgtactccagcctgggtgacagagcgagactccatctcaaaaaataataataatgataaaaaaataaaaatgtaaaaagacacagaggtgaagacagaaagagaggacagataaaaaagtggacagaccaggagggggccgacacagaggtggagaaaaagaggggcagacagagatgtggacacagaggaagaggagacagataaagaggcagacagaaggggaggggggccaaatacagaggtggacagagaggaagaggggacagatgtaaaggtggacagaaggggaggggtactgatacctgggtgaacacagaggaagagggaacagaaataggagagcagaatggagggagggaaaaagagaagtggacagagaggaaaaggggacagataaagaaatggacagagggagagggtgacagagaggtggacagagagaaggaggggacagatgcagaggtggacagaggaagaggggacagataagtggacagaggggaagaggggacagatacagagatggatagagaagaagaggggacaaagaggttgacagagaagaagagggggctcggcatggtggctcatgcctgtaatcccagcactttggaaggccaaggtgggtggattgcttcaggtcaggagttcgagaccagcctggtcaacatggcaaaaccccatctctacaaaaaatacaaaaattagccgggcgcacgcacctgtagacccagctactcagatgcctgaggtgggaagattgcttgagcccgggaatttgaggctgccttgagccctgatcatgccattgtagtccagcctgggtgacagagcgagacaccgtctcaaaaaaaaagaagaagagaggacagataaagagatggacagaaggggaggagggacaaatacagaggtggacagagaggaagaagggagagataaggggacagagggaaggggcaacagatacagaggtggacagagaggaagaggagagagattaagaagtaaacagaggcagaggggtgacagatatataggtggacagcaaggaaggggagagatacagaggtggacagagcagaaggggacacagataaaaaggtgcacagagaagaagaggggacagataaagaagtagacagaggagaagggggaacagatagatagacagagcaagagaggaattcagtacagaaacgaggagacagagaggtaagaaagaggagcagcaaaaacacagaactagaataatggggacaggcagaaattgtgcaaaaacctagaaaccagaaaaatgaacatcagtgacaagtgcagaaacagagaaagattagggccgggtgcggtggctcatgcctgtaatcccaacactttgggaggccaaggtgggcagatcacctgaggtcaggaattcgagaccagcctagccaacatggcaaaaccctgtctctactaaaaatataaaaattagccaggtgtggtggtgcaagcctgtaatcccagctacttgggaggctgaggcaggagaatcgcttgaacccgggagatggaggttgcagtgtgctgagatcacgccactgcactccagcctgggtgacagagcaagactccaaatgaatgaatgaattaatgaatgatgaaggcaggtagccaatctggattgctccagttgccaggaatctcaagcacattattcagtctaactactgccctgagaggagagcactattactaccccaaattttagcacaggaaaccaaggctctgaggagggatactgacttgtcccaggttctccttttttctgactccagtgttctttcaggtggggagctaggtaagcacacacagaggggaaacaatggaagggagggacaaagtggggaaggagagcagaggaccagcgggagtgtcagtgagcagcagcccagacagcagggagccaggcatctggctgtacctggggtgggaggcgggatgtccggtggacccagtcctcatcccctggccggtcccggcccgtctgctggcagagctgcagggcatggtgttcgaggagcgaggccacccttccaacaggctgaggcacctgggtagggactggaagcagcaggggactcgcctggaactcccgtggctctggaggcaggaacagagtcagctggccctgccgcatggcaacgctatgaggttcccccccaccttcctcctcacccctccccacagcctcatgctcaccacctctggaactcaattctggcacgaccagcctgctggcatggaaaggcttctggagggccgagccctggtgggagagcaggctcagaatctccagggtgaagtgggatgagggttgccaggggtagggggccaaaaccctgggcacccagacggggacaagagaagatccatgggagtcaggggtctcacctggaggtgctgcagcttgggagtgcgaaggtggggcgggacccaaggcagtgccagctggtcccgaatttggctcccaatggcccggaggagaatagctgagtcacctatgggggatagggaggaagtgaatcagatgtcaatgctgcaaatccaaaagggcataccctaggagaccagcctccactcctgacccccatccagagatacacatctatccagcttgcgttctcacgttcagtcattcaacaaacaccgagcacctactatgtacaggtcgctgttctagacactagggctacttcgtggaacaaactggataaaggtccctgccctcagggagccggcaagctagcagaggagagagatcatgaataggatcctgaataccatccagactgcagccaggtggggatcaggagagggctgcggagaggaggttaacctcaaagaggtaagggagtgaaccatgagggtacctaggggaaaggtaaccaacgatacaaaggtgcagaggcgggagtgtactggggtatgtttgagtagcacccaggaggcccaagtggttagagcgaagtgagagagagggagggcacaggggttgagtcagggaggcccctccccgcaccaacgcaccaccggggtcagctcaacctcagccccctgccccctgccctgtagcccctctctgatgcctaatcctcctgcctagctctcctgaaggcacataccgccacccctacccatcaacctttttaccacctctacctctctcagccctacagcccctagaaggccctcctctcccctcaccgcccccgcccacatcccagacacccagtacctgcaggctggtctgcatcctcagaggcatcggtgggcagacgctcagccaagaagagaagcaggtctcggaggtcaggctcactggggtagaggaagttctgatagccaagctccaagggatagcccaggtcctgagggttggtgggcggctatcaggaagcaggcagggtcctcctgccctgggagacttgggcctaggctgaaaacgctcccactttctcactaaccaccaccctcccaacctcccccagctccccaaggcctctgggccctggggggagtcacagagtgatgatagtcaacgctacagagaacaagaaacaagattaaagctctggcctttctatgactcaaaatccagaggccataaaagaaaagatgggtacttttgaatacatgaaaagaaagaaaatatttaaagaaaatagaataagcaaagtcaaaagttaatgacaagttgggaaaaaatatttggagcccatatcataggtaaagagcaaatctacctattatagaaagagtgcctaaaaataaacaggacaaaaagaccagaagcacaatagctcagaacaaaaggactcatgagggttctgatggggactgaggaaacaggccaggagagaaagaaagcctttttcctttttttttttttttttttgagacagggtctcgctctgtcgctcaggctggagtgcagtagcgtgatcttggctcactggaacctctgcctcctgggctcaagtgatcctcccacgcagcctcccgagtagctgggattacaggtgcatgccaccacacccggctaatttttgtattttcagtgtagacagggctacaccatgttggccaggctggtctcaaactcctgggctcaagcaatctgcccacctcagccacccaaagtgctgggattacaggtgggaatcaccacacccggcctaggaaagcctttttcttccagagttgccactgctttggaactgcatagactctgaaagcagacttcctggattcaaacccaagctttgcctcttaccaactatacgacctcaggcagatcacttaatccctctgtgcttcactttcttcatctgaaagagggtataccaacagtacatatagcagaaggttgtcctgagaattaaatgagttaacaccatgttacttaccacagggcctggcacagagtacacttagaagccatcattattctatacttaggagtatactgggtcacaatgcaagatatatttattttggaggctcaaggtcaaataagtataaccactggcttttaaggtattttactttggattttttccacaatatgcaatcaaagagctgtgactgatatagaaactcattccaggagtggggaaggtgccaaaatatggaggtggctaaggtgcagaaactgttgccaggagcagggcatatgaagaaaagatgccagaacatggcagtgctgagttgcgggggggctacagggacagcacacagctggattaagagaactccttttgcctgctgctgataaaccaaggctgctgggggccagacaaccatatgtacctgttttttatttttttggaaacaagagtcttgctctgtcgctcaggctggagtgcagtggtgcaatctcgactcactggaacctccgcctcctgggttcaagcgattctcctgcctcagcctcctgagtagctgggattacaggcacacaccaccacaccaggctaatttttgtatttttagtagagacagggtttcgccaggttggccaggctggtctcaaactcctgacctctggtgagatctgcccgcctccacctcccaaagtgctggaattacaggagccaccgtccccagtctttttttttttttttttttttggagatggggtttcactctgtttcccaagctagagtgcagtggcgcaatcacagcccactgcagcctggacctcccaggctcaagcaatcctcctacctcagcctcccacatagctgggaccacaggcgtgtgccaccatgcccagctattttttttttattttttgtagagatgggggtctcactatgttgcccaggctgatctcgagctcctgggctcaactgatcctcccacctcagactcccaaagtgctgggattacatgcaagagccaacgtgcccagcccacatgtacctcctggccactggaaaagccatagtcactaacccccactaaaatcaatgtaagcaaaagcaggtgaacaaaatccaagagagacagcactgagggaagaacagagaactgcaggaagcctgagcccccacctcaacacctcctgctgtgtactctcctctgcaaacagaagacataacttcccccctattaagtgctaaccttaagaatacatacagtcctgggccaggggacagactgcctgcctcataaggccaccaagagccccagagagaacaatgtgacaactcctgagagctgggtgaacctgagagcgaagggatggatggagctctgagacctgttgctaagagacagaaactgcataagcaaggcccaaatttaacaactctagccacccagtcccctatatctaaatgaaagttttcacggtagttactctatcgtccctccaccaccatatacttcctgggtcagttcaaagtgtttccattcactatgtattcacaggttccagatcggacctatccaataatagtaatcccatttatgcaaagcttattataaccagcttttcacacattaactcatgtttaatcctcacagcaaccctatacagtagctacaattcttatacccattttacacatgtggaaacttagcctcaaaaaggttaagagagccagacgcggtggctcacacctgtaatcccaacactttgggaggctgaggtgggtggatcacaaggtcaggagttcgagaccagcctggccaagatggtgaaaccctgtctccactaaaaatacaaaaaaattagccgggcacagtggcagacacctgtaatcccagccactcggcaggctgaggcaggagaattgctggaacccaggaggcggaggaggttgcagtaagccgagattgtgccactgcactccagcctgggcttcaaaaaaaaaaaagactggcccaaagtcacagagtgagtgagccagggggagtggcattacttgcagctcttgaatacaggaactggactcctggactcagctctatactgggaatgggtgagtgtttcatcagaatggctctttaccaggcacagtggtgcacgcctgtagtcccaactactcaggaggccaaggcgggaagattgcttgaggccaggagcttaagaccagcctgggcaacatctctacaaaagcgagaccccatctctacgaaaaatttaaaaattctcgggcagggtggcatgtgcctatagtcctagctactagtgaggcagaggcaggagaatctcttgaggccaggagttcaagaccagcctgggcaatatagcaagacacttacctctaaaaaaattaaaatattttttaaaagaaaagcactttatttattctgtcacagagacattgttggaattgctcttagcagaggcaggatatgtggttcccacagaggtaatatagcagacactcttttgggtaaccagcatgcctttctttgggtaatcatccttatcccaactccac

SEQ ID NO: 1150 - DNA, 38392 bp, Homo sapiens
gtggagttgggataaggatgattacccaaagaaaggcatgctggttacccaaaagagtgtctgctatattacctctgtgggaaccacatatcctgcctctgctaagagcaattccaacaatgtctctgtgacagaataaataaagtgcttttcttttaaaaaatattttaatttttttagaggtaagtgtcttgctatattgcccaggctggtcttgaactcctggcctcaagagattctcctgcctctgcctcactagtagctaggactataggcacatgccaccctgcccgagaatttttaaatttttcgtagagatggggtctcgcttttgtagagatgttgcccaggctggtcttaagctcctggcctcaagcaatcttcccgccttggcctcctgagtagttgggactacaggcgtgcaccactgtgcctggtaaagagccattctgatgaaacactcacccattcccagtatagagctgagtccaggagtccagttcctgtattcaagagctgcaagtaatgccactccccctggctcactcactctgtgactttgggccagtcttttttttttttgaagcccaggctggagtgcagtggcacaatctcggcttactgcaacctcctccgcctcctgggttccagcaattctcctgcctcagcctgccgagtggctgggattacaggtgtctgccactgtgcccggctaatttttttgtatttttagtggagacagggtttcaccatcttggccaggctggtctcgaactcctgaccttgtgatccacccacctcagcctcccaaagtgttgggattacaggtgtgagccaccgcgtctggctctcttaacctttttgaggctaagtttccacatgtgtaaaatgggtataagaattgtagctactgtatagggttgctgtgaggattaaacatgagttaatgtgtgaaaagctggttataataagctttgcataaatgggattactattattggataggtccgatctggaacctgtgaatacatagtgaatggaaacactttgaactgacccaggaagtatatggtggtggagggacgatagagtaactaccgtgaaaactttcatttagatataggggactgggtggctagagttgttaaatttgggccttgcttatgcagtttctgtctcttagcaacaggtctcagagctccatccatcccttcgctctcaggttcacccagctctcaggagttgtcacattgttctctctggggctcttggtggccttatgaggcaggcagtctgtcccctggcccaggactgtatgtattcttaaggttagcacttaataggggggaagttatgtcttctgtttgcagaggagagtacacagcaggaggtgttgaggtgggggctcaggcttcctgcagttctctgttcttccctcagtgctgtctctcttggattttgttcacctgcttttgcttacattgattttagtgggggttagtgactatggcttttccagtggccaggaggtacatgtgggctgggcacgttggctcttgcatgtaatcccagcactttgggagtctgaggtgggaggatcagttgagcccaggagctcgagatcagcctgggcaacatagtgagacccccatctctacaaaaaataaaaaaaaaatagctgggcatggtggcacacgcctgtggtcccagctatgtgggaggctgaggtaggaggattgcttgagcctgggaggtccaggctgcagtgggctgtgattgcgccactgcactctagcttgggaaacagagtgaaaccccatctccaaaaaaaaaaaaaaaaaaaaagactggggacggtggctcctgtaattccagcactttgggaggtggaggcgggcagatctcaccagaggtcaggagtttgagaccagcctggccaacctggcgaaaccctgtctctactaaaaatacaaaaattagcctggtgtggtggtgtgtgcctgtaatcccagctactcaggaggctgaggcaggagaatcgcttgaacccaggaggcggaggttccagtgagtcgagattgcaccactgcactccagcctgagcgacagagcaagactcttgtttccaaaaaaataaaaaacaggtacatatggttgtctggcccccagcagccttggtttatcagcagcaggcaaaaggagttctcttaatccagctgtgtgctgtccctgtagcccccccgcaactcagcactgccatgttctggcatcttttcttcatatgccctgctcctggcaacagtttctgcaccttagccacctccatattttggcaccttccccactcctggaatgagtttctatatcagtcacagctctttgattgcatattgtggaaaaaatccaaagtaaaataccttaaaagccagtggttatacttatttgaccttgagcctccaaaataaatatatcttgcattgtgacccagtatactcctaagtatagaataatgatggcttctaagtgtactctgtgccaggccctgtggtaagtaacatggtgttaactcatttaattctcaggacaaccttctgctatatgtactgttggtataccctctttcagatgaagaaagtgaagcacagagggattaagtgatctgcctgaggtcgtatagttggtaagaggcaaagcttgggtttgaatccaggaagtctgctttcagagtctatgcagttccaaagcagtggcaactctggaagaaaaaggctttcctaggccgggtgtggtgattcccacctgtaatcccagcactttgggtggctgaggtgggcagattgcttgagcccaggagtttgagaccagcctggccaacatggtgtagccctgtctacactgaaaatacaaaaattagccgggtgtggtggcatgcacctgtaatcccagctactcgggaggctgcgtgggaggatcacttgagcccaggaggcagaggttccagtgagccaagatcacgctactgcactccagcctgagcgacagagcgagaccctgtctcaaaaaaaaaaaaaaaaaaaggaaaaaggctttctttctctcctggcctgtttcctcagtccccatcagaaccctcatgagtccttttgttctgagctattgtgcttctggtctttttgtcctgtttatttttaggcactctttctataataggtagatttgctctttacctatgatatgggctccaaatattttttcccaacttgtcattaacttttgactttgcttattctattttctttaaatattttctttcttttcatgtattcaaaagtacccatcttttcttttatggcctctggattttgagtcatagaaaggccagagctttaatcttgtttcttgttctctgtagcgttgactatcatcactctgtgactccccccagggcccagaggccttggggagctgggggaggttgggagggtggtggttagtgagaaagtgggagcgttttcagcctaggcccaagtctcccagggcaggaggaccctgcctgcttcctgatagccgcccaccaaccctcaggacctgggctatcccttggagcttggctatcagaacttcctctaccccagtgagcctgacctccgagacctgcttctcttcttggctgagcgtctgcccaccgatgcctctgaggatgcagaccagcctgcaggtactgggtgtctgggatgtgggcgggggcggtgaggggagaggagggccttctaggggctgtagggctgagagaggtagaggtggtaaaaaggttgatgggtaggggtggcggtatgtgccttcaggagagctaggcaggaggattaggcatcagagaggggctacagggcagggggcagggggctgaggttgagctgaccccggtggtgcgttggtgcggggaggggcctccctgactcaacccctgtgccctccctctctctcacttcgctctaaccacttgggcctcctgggtgctactcaaacataccccagtacactcccgcctctgcacctttgtatcgttggttacctttcccctaggtaccctcatggttcactcccttacctctttgaggttaacctcctctccgcagccctctcctgatccccacctggctgcagtctggatggtattcaggatcctattcatgatctctctcctctgctagcttgccggctccctgagggcagggacctttatccagtttgttccacgaagtagccctagtgtctagaacagcgacctgtacatagtaggtgctcggtgtttgttgaatgactgaacgtgagaacgcaagctggatagatgtgtatctctggatgggggtcaggagtggaggctggtctcctagggtatgcccttttggatttgcagcattgacatctgattcacttcctccctatcccccataggtgactcagctattctcctccgggccattgggagccaaattcgggaccagctggcactgccttgggtcccgccccaccttcgcactcccaagctgcagcacctccaggtgagacccctgactcccatggatcttctcttgtccccgtctgggtgcccagggttttggccccctacccctggcaaccctcatcccacttcaccctggagattctgagcctgctctcccaccagggctcggccctccagaagcctttccatgccagcaggctggtcgtgccagaattgagttccagaggtggtgagcatgaggctgtggggaggggtgaggaggaaggtgggggggaacctcatagcgttgccatgcggcagggccagctgactctgttcctgcctccagagccacgggagttccaggcgagtcccctgctgcttccagtccctacccaggtgcctcagcctgttggaagggtggcctcgctcctcgaacaccatgccctgcagctctgccagcagacgggccgggaccggccaggggatgaggactgggtccaccggacatcccgcctcccaccccaggtacagccagatgcctggctccctgctgtctgggctgctgctcactgacactcccgctggtcctctgctctccttccccactttgtccctcccttccattgtttcccctctgtgtgtgcttacctagctccccacctgaaagaacactggagtcagaaaaaaggagaacctgggacaagtcagtatccctcctcagagccttggtttcctgtgctaaaatttggggtagtaatagtgctctcctctcagggcagtagttagactgaataatgtgcttgagattcctggcaactggagcaatccagattggctacctgccttcatcattcattaattcattcattcatttggagtcttgctctgtcacccaggctggagtgcagtggcgtgatctcagcacactgcaacctccatctcccgggttcaagcgattctcctgcctcagcctcccaagtagctgggattacaggcttgcaccaccacacctggctaatttttatatttttagtagagacagggttttgccatgttggctaggctggtctcgaattcctgacctcaggtgatctgcccaccttggcctcccaaagtgttgggattacaggcatgagccaccgcacccggccctaatctttctctgtttctgcacttgtcactgatgttcatttttctggtttctaggtttttgcacaatttctgcctgtccccattattctagttctgtgtttttgctgctcctctttcttacctctctgtctcctcgtttctgtactgaattcctctcttgctctgtctatctatctgttcccccttctcctctgtctacttctttatctgtcccctcttcttctctgtgcacctttttatctgtgtccccttctgctctgtccacctctgtatctctccccttccttgctgtccacctatatatctgtcacccctctgcctctgtttacttcttaatctctctcctcttcctctctgtccacctctgtatctgttgccccttccctctgtccccttatctctcccttcttcctctctgtccacctctgtatttgtccctcctccccttctgtccatctctttatctgtcctctcttcttctttttttttgagacggtgtctcgctctgtcacccaggctggactacaatggcatgatcagggctcaaggcagcctcaaattcccgggctcaagcaatcttcccacctcaggcatctgagtagctgggtctacaggtgcgtgcgcccggctaatttttgtattttttgtagagatggggttttgccatgttgaccaggctggtctcgaactcctgacctgaagcaatccacccaccttggccttccaaagtgctgggattacaggcatgagccaccatgccgagccccctcttcttctctgtcaacctctttgtcccctcttcttctctatccatctctgtatctgtcccctcttcccctctgtccacttatctgtcccctcttcctctgtccacctctgcatctgtcccctccttctctctgtccacctctctgtcaccctctccctctgtccatttctttatctgtccccttttcctctctgtccacttctctttttccctccctccattctgctctcctatttctgttccctcttcctctgtgttcacccaggtatcagtacccctccccttctgtccacctttacatctgtcccctcttcctctctgtccacctctgtatttggcccccctccccttctgtctgcctctttatctgtctcctcttcctctgtgtccacatctctgtctgcccctctttttctccacctctgtgtcggccccctcctggtctgtccacttttttatctgtcctctctttctgtcttcacctctgtgtctttttacatttttatttttttatcattattattattttttgagatggagtctcgctctgtcacccaggctggagtacagtggtacgatctcagctcactgcaacctctgcctcctgggttcaagtgattctcctgcctcagcctcccacatagctaggactacaggcatgcaccaccacgcccagctaatttttgtatttttagtagagacagggtttcaccatgttggccaggatggtctcgatctcttgacctcatgatccatctgcctcggcctcccaaagtgttgtgattacaggcgtgagccaccacgcctggctgtctgtttttgtttttatatctgtagtaattttcaaacataaatgtagagagaatattctagtgaatcctatgtaccattttgccaacttttcttcatcttttctctcccaactttttctttgttgctgtattattttaaagcaaatctcagacatcatgtcatttcagctctaaatacttaggactacatctcttaactcataaggacattcagttttcaaggtaaccactggaccattttcatggctaatgaagttaacaataatatcttgtgggtttttttttgttttgttttgttttgttttttgtttttttttgttttgtttttgagacggagtctctctctgttgcccaggctggagtgcaatggcgtgatgtcgcttcactgcaacctccacttcctgggttcaagccattctcctgcctcagcccccaagtagctggaattacaggagcacactaagttttgtatttttagtagagtcggggttttaccatgttggccaggctggtcttgatctcctgacctcaggtgatctacctaccttggcctttcaaagggctaggattataggcatgagccactgtacccggccaacaatgatatcttaataccatccaatacttgagttcataatcagattttcccattatcttgaaactctgttgtccctctcttgcctctctctctctgcctctttctgtgcttggtacctttgattccctgtctctgccctgtcccccgatatcctgtctatgcttctcttggatttgggggctctaggcccacccccctctcttcccacatccttctccagcatggggatctagtgggtggagagaagtatgtctgtgagcaagaggagacccctgtcctcgaggagatcccaggctggtggagcaggagagtagagcagggcctgccttagtgggaaggctggagggtgggggtgacttgtctgtatactcttgtcagggggtccttggaggaggcagggccttgggtgctaggtgggcccctacaccttcctgcttcccccgccttttctccccaggaggacacacgggctcagcggcagcggctgcagaagcaactgactgagcatctgcgccaaagctggggcctgcttggggcccccatacaagcccgggacctgggagaactgctgcaggcctggggtgctggggccaagactggtgctcctaagggctcccgcttcacgcactcagagaagttcaccttccatctggtgggtgcgcctgaggacatgagatgtgtggatgggcgtggcaggcttggagggtggctttttgtgtcagcaccacacctttatccacacaggttcctgtgttcccactggacaggccctcgccccactgtgggatgggtacccagaggggtcccctagcttattagggacttgactggagaaaatgtggataggtgggaaccatgcaaaggtgtgggggtgttcttggggcaacaccccctttcctcaggcagtttcctttgagcatatcttctgtcctaagatgttcactctgagggccccccatccttctcatgggcatttgaggcttgagagatggggcaggtgggtaggagctgtgacagggtcagggagatttctccacgagcaagcactctggcccgaggttgcagatggtgcctttacccacatagtcacagtctggccaccatcggtgcttcagtgggcatgcatgccgcactgggggcagttctcaggggaggctgaggctgggccacgtgaggaagggccttccctggcagccaggatgcccctcgtcactccccttaggagccccaggcccaggccactcaggtgtcagatgtgccagccacctcccggcggcctgaacaggtgagcagagtggtttggaggggggtgtcccaggcccttgcttgtctactgggcctgacaccccaaccctgactggcctgggcctcccaggtcacgtgggcagctcaggaacaggagctcgagtcccttcgggagcagctggaaggagtgaaccgcagcattgaggaggttgaggccgacatgaagaccctgggcgtcagctttgtgcaggtaaggggcggaggaggggctgcgcgttgggctaggtcagaaggagggcctcggggtgtgagggactagatggggcaagaggtgctctgtagaggtctgcacatggcagaagggttcctgggagccattagggatctgtgggcctcttgagggtggctatgagaatcaggccagggtgagggtctgtgggcatctatggggcaccgcgggtctgcatgggcaggggattgaggggtcctcggagggtctgtgggcatctgtggggtacccacgggtctgcatggacaggggattagggggtcctcggggtccttggcaccagcgtggagctgttagagaggcctgtgggggccacaggggtgtacagtcatctgtggagctccatgggggctgtggcatgtgactgggtatccaccggccaggcagagtctgagtgccggcacagcaagctcagtacagcagagcgtgagcaggccctgcgcctgaagagccgcgcggtggagctgctgcccgatgggactgccaaccttgccaagctgcaggtggggttggggctgtagctgggcggagaggggcagggtggggtggggtggggttggagggcccagcctgtgtgacatgtacccatcccccaccagcttgtggtggagaatagtgcccagcgggtcatccacttggcgggtcagtgggagaagcaccgggtcccactcctcgctgagtaccgccacctccgaaagctgcaggattgcagagaggtaagcagtggggccctgggctgtgggcgggccagggcaggctcggtccctctctagggggccatccctatgctctgctcactgtcttctgcctgtgggctcatggcagctggaatcttctcgacggctggcagagatccaagaactgcaccagagtgtccgggcggctgctgaagaggcccgcaggaaggaggaggtctataagcagctggtaaggcctgtgtgagggacctgggtagcttaggagggtggggggatggtcctggggcagtgcctgctatatccctgcctagatgtcagagctggagactctgcccagagatgtgtcccggctggcctacacccagcgcatcctggagatcgtgggcaacatccggaagcagaaggaagagatcaccaaggtacactgccagggccatggagggtgggtcatgtgggctgtcaggcatagtgtggccgcacagggacctcacaccctcaggcagagctgtccagtcacactctaacacagaatagtcacacacaatccatcccagtcacccctgacacagtgacacagtccctgtctggtacacatgaggaccctccactgctagccagcctgccccaggcaggggctcatggctgccatggtgtctgccagatcttgtctgatacgaaggagcttcagaaggaaatcaactccctatctgggaagctggaccggacgtttgcggtgactgatgagcttgtgttcaaggtgtggggcaggttgggcgggggtgagtggggtgaggctgggctgctgccttgtgcatctgctaattggctggctggggtccagacccaggccctgtgcgaggctggaggtgcactgatacccagggctggctttgtttcatggaggatgaagctagtggggtggtgggagagggtggccttcttagggcatggagatggtcaagggcagcccactgatacctttgaggtccctgtgtctggtcaggatgccaagaaggacgatgctgttcggaaggcctataagtatctagctgctctgcacgaggtgaggggagacatgtgcctggggtggggctgctgggggtgggtgggactgggtgcaagccttctgctcctgttgtccccagaactgcagccagctcatccagaccatcgaggacacaggcaccatcatgcgggaggttcgagacctcgaggagcaggtgaggcctgggggcaggatggggagccaaggcgggccggggggacagttcctcaggttatgctgacagaggctgtggagccacacacagccgatggctggacacccagccctgccccttagtgcctgtgacctgggacaggcaagtggcctactgtgagccccagcttccaccccaagggccctcctgtctgcctcccagggccatgggcagaggcttcagcttaaagatgtagggggaatcctgccacatggcgaaggatgctttgggtagagggaacaccacacgaggcctggccatgggacagagcaggctgttggagttggtgggaggggcccagagtggctgtgatgggggctggtgagcaggagctgggaaaggggctgtgtgtgctgagggggcatgtgttcacattgcctcagatcgagacagagctgggcaagaagaccctcagcaacctggagaagatccgggaggactaccgagccctccgccaggagaacgctggcctcctaggccgggtccgggaggcctgaggagccgccggcagaggtctctccccagcctcaggcagggatttggggtgctggaggcagtggccaagcacatgccctagctacttcctccgctgtccagttcctcctgctgcggccttggacccagacccctgcccactgaccgcaacccttatatggggtgatagtccagcatgtggggagctcggctgcagtttattggggacggtactgtgggttgggggccttggatcccaaataaatgagtagttcctctgcagtctaagctgaggcatggatcagggctcagggaatgggagtgaggtgagtggcaggggagacacggggtatttttggcaaggcagtgtgtgtggctgtgtgtgtctgcacgggactcaagagacccactggggggctgtgcgtgtgcatatgcgtgagatacacaggtgaattctaacaggccgtgtgtgtgagcgagcacgtgttgggacctcagatcctgagggtactgacgctgcttctgtgtaggcctctgggcacacccctgtgttgacagtgcccctgtgggccctgaggctggctgtgggtgcgtgccttggggtgtgtgggttgtcagggctgtgcttgtgtgtgattgtgtgatgatgcagctttgaggttgtttgagtgtactgaggcaggctctctgtgttttggggtttgtgttgagtgagggacaggattgtgacattttgtgtgtctgtgtgacttttccagccctgaagtaatctgtgcgagcagctgaggcaggctctgtgtggctggttgtgaaggctctgtttggctgcagggctcgactggggggtgtgtctggggcggaggtgggggctggggccaggaccggggcccctctgagcagccttggggcaaaggatatgatgggggagggggtggctgccagcgggggaacaggggccctggcaggcaagacagtggaaacctcacttcttggtccctgtgggcacatccagggcctatcatccctgcccccaccacctctgcctcccaccagtttggcccctgttcgtccatcctcctttccttgatcttgaggtcaggggccaggtgtagggttggaacacctgctgggcctctggctccgtttcttgcggaactccagctcatccacggtccacacagcccccttctcgctctccacccgcacaaagcacttgtgcagactcaggttgtggcggatggcgttctgtggaaggccggggacagggagcaggtgggcgtcaacctctgaggccagcagccaccaccaacaacccacatcccgttcctccccaatgtgcctatgagcccagacccaggcctgcccactttgagctgcgatggcacttgaggccatcccagtcaccgccacctcagaggagctcaccttccaggtggcaggatggtttctgaagaaggcaaacatgcgtgtgaaccagtggtagatctcattgagtgtccgctgcttctctggagcctccaggatggcctggaagttggggggtggggtaaggggcacattccccaaacttggggtttagaggggctatgacctaccccgagccatctgacatgggggcggaattgtaggggcaggtaatcagggacaggactagatgtggggtgaagcatggggtcaaagatggggttagaaaaggggtgaagtgtcgggttgggcagggttagatgggtgtgggtatggttgttctgggattaggtaagggatcaggactgaggttgggagtggggtcttgttcagggctagggctgaagtgaggtgaaaggtctgggatggagttggagttggggttctctgtggaggtgacatttcagggttggggaaggtgaagggtcagaagtggggtcaaggatttggaaggggtaaagggccaggccaacttaagggtcagggaaggggtgggttaagagtcaggctggggtggactcaggtggggggtctaggggtgagggatgggatgacttggctttaggtcagaagccagagatggtttgaattatcgagtatcttacgtgtcagggacatggttaggtggttaggctcagggcaaggatgaggttagttgtggggttcggtgtggagtgaggctgagggtcagggaatttgatcagtttggattcaggaatgggattacagagtcagcgatgatgattgcagtgaggctatcagtcaggatggggctaggtcagggtttcagttcagagacagtcggggaatatctggtatcatgtaggggtgaggttcaggtttggggttaggtgtggcgctaggatgaaggttctgagaaggcattggggaggctgagatgaaggagttgggatggggtgatgaagttaaggatcaaatgggtgttacaaggaaaggttgggaatggtgcccagttgggggtgtattgacatactggggtacgttggggccagggaaggagatggggttgggttggcataaaggctggggaaggagttagagtaagagctggggtacgtttagggcaaggtgcagagatggggttagctttaggctattttatgggtccaggagagggttaggtatggggctgaggtggacatctggaaaggggtaggtttagggtcagaatttggcatgctctggcctggatggtggtttaggtttggatttgcggacaggtttggggtgaagccagcatgaggggtcacatttgaggcacggcttggggatccttggggctggggcttgggaatggaggaacccactctgagggcactcagagggagacaggagtttgggaggcaggtcccccaccccatctttgtcttcctcctccttggggccgagctgccctgcttacccagcggatgagcgtggcgtaggtgaaagggggtcgcatgttgtggaacttgaagtagtccatgttgtggaggaactctgtcagagggtggggatgaatcaagccccatgcaggacctcctagctagctccctgtcccctccccctacaaggtgagtctacaggcctgagatctcaccgtcaacacccgtgtccacgggcacaggtactgtttgctgagcacctgacataagttgtatcatttattctttgcaccacttctgccaaaatagttctccccgaggttgaaaagaagcggagtaacttgcacaccaaaggatgcaagaggttaaatggcagagccaggatgacagtcaaggtctctgatccctgctaagcccacaggccaggcctggtggagagcagtggataggtgagctcgggcgaatccaccccgattttccttggtcaggggaggaaaggaggtgctcctggaattacttagcagggtccctcccttctgatggccgaatatagtagctggagtccagagtgggtgaggcatggccccaatccccaagggagtcagggctaggggcccgacactcgagaccatatggggggctttcaggccacggacatcccgaaaggaagcttttgtgagcggatgcattttcccaaaggctgagtggcggcagctgcagtggtggtggtggtgggaaggggcagcatggagctcctttgcaccctccacccagagcctgtcaggattaggagcttgggggcaccgtgtagtgcaaggaccattcttacctgggaatgtgctgtttccatggctaccccacaggtgcctccggacagcaaacaggctgtcaggggcctcccgggggccagaccaggctgggacgacagggccttggctgccagcagctacgatgcagcaggagcccttgtcggatgatgcctgggtgagggggagaggctggtgacccagaggcttaaacttcccactttttactttctattttatgttttttattttttttgatactgagtcttgctctgtcgcccaggctggagtgcagtggtgcaatctcggctcactgcaacccccacctcccagattcaagcaagtcttctgcctcagcctcccgagtagctgggactacaggtgcccgtcactacgcccagctaatttttgtatttttggtagagatggggtttcaccatgttagccaggctggtctcgaactcctgacctcatgtgatccacccgcttcagcctcccaaagtgctgggattacaggcatgagccactgcgcctggctccactttatttttaaatcagtgtttttcaaagcaaggacgccctcttctaaattccagtctgaggtggaatcccacaaaacagcatgagccgtatttattagagcacaggtgcggatgtcgtatgtggccactgatgctgggaccatgaactggggttgaatagggctctttaccacccaactgtgaccttgggaaagtcacctaaacccccctggcctcaatattcctcatctgtacattcgcatcatgagaaataaattaccaccagcaaagcgctcagaaacagtgcctggcctccagggctggcttcatgggcgtgtgacctatgtggttatgtggcaccctgtgctttgtttaatgctctgtggtcgccatcttgaaatctgaacaaggggccctgcaggttacatagctggtcctgctggcacacagcctgcatctggcaagtctggctatttgcatttgctttaacaactcaggatcacagtgtttggggatcttagagtcagagggttttttttttttttttttcttgagacggagtcttgatctgtcgcctaggctggagtgcagtggtatgatctcagctcactgcaaactccgcctcccaggttcaagcaattctctgcctcagcctcccaagtagttgggactacagacacctgccaccacgcctggctaattttttgtacttttagtagacacagggtttcaccatcttggcgaggctggtcttgaactcctgacctcgtgatccacccgcctcggcctcccaaagtgctgggattacaggcgtgagccaccacgcccagccggggtcagagggtttgtaagtagaaggggacagatttccaggtctgggcatgtttggagctggggacaggggcccctagctctcaggacctgaatgtgaggttaggttccctgcaccgtgcagacctcctccctgccccccagcagtctgagtctgccaccaccagtcctggggtcgctcaccacagatgaagccttggtcagtgccattttcccagccaggtgggcctgcatggcactcagcttctccttctccagcaccagctgtgaaatggcacaaacatgaggcctcagcctggcccttctctgccacatctttgcccaggctacggtcttccctgggagtgcccgctcctcttccttcctttataccagccctcgtcccaggtgaacttggtttctggcacatggtggacagaaggttttgcgcactatccctatcccttaccctccaccgccctggcattacctgctgctccagagactgtaccatctctctctggaggagacattgtgccctgcccttctcatccagaagatggtccgcctggcagtgcctaagtagggagaagattccatgcaggtgaccacgacaggcctggtctggctcaatgctctgaatggggagggcccagaccctctgggagttctctcctctgagccccagctcccctcccctctctacctcagtctccctctcacacccctcgttcccttaacacatgcccctcagcacctactgcatgtcaggcctgaactcaccacttgagcctggccagagtgctggagataatgttggaagtgtggtgagttgagaatgggccagggaggtgagagtgggcaaagcattctgggtggagggacggcctgtgcaaaggcctggctgcaaggaggacaggacatgtggggttgctgctaagggttgtgtgtagtgtggtgtgtatttgtgtgtgtgtgtgtgtgagagagagagaaagagagagagagagagagagagagagagagagagagagagagagagagagacatatggggggactgaggggaggcagcagcagccatctagaggagctagaactttgggaacagtggaataaggctggcatgttggcatgaggagtagcagggcaaagcaggagtgcagattctagagcctggctacatgggttcaaatcccagctctgtcactcaggaactgggagattttgatcaagacacttaacctctttggcctcagtctccttgtctgtaaaatgggggtaaataacagcacaaacgtttcttattatacatacgagaaaactgaggtcgagagaagctaagtaatttgtccaaggtcacacagccagtcagggatggagctgggatttgaacccacagtctcagagtttagctcttgcatcttactacttattgggatgaagcctgagctgagatctgcaccctagacctctccccacaagccagggccggtagactggcacaggcctgggccactcacttgaggaagtcctctggctcttcgaagaccttctcacatccgggccacttgcagacaccatttgccagcagtgggtaggagctctggggcacagccgaaagggtgctggggggacagagggtgtcaggggaggggataggagggcgaggatccttcccagccctgtccactgacctgtccttcctgggtgcactgggatttgggaaggtgcagagcagtgccggctccctggacacccattccaggctggccacgttgatccctgtgggtggggacagggcacctatggaggctgtgggctgggctctggagcttggcccacaaggcctctcattttgagcttcccaccctcctgagcctcgaaaaccctgactcccagggggctctgctgtccccaaagtcccaggcttctggcagagaagcttaaagacggccattcgcaggtgctgacattttgactagctttgtaaagctctgtggttttgtgattttgacattctgcatctttaaggttctgcacctgacgttttttggagggtggagtttccaagcctctgagacctgacacctttgacccccagagtactgcaattcagaatagcctacactgctcacagccaaggatctggggacttgggggttctgtgaagccatggggtacgggctgaggtgttaccaggtgggaggccaggccgggccttgagggagaagaccccagtggcggtggtgggtggtgtgaggctgatcatggctgggctctccagggggtgcacctgcagcacaggggtccgggcgtgggcatccaccgttgagagctggggggcacatgtgggctgtggttcagcctgactcggggcccctccccacagttctcccacctgctccctcctccctgcccattcaccgtccatacctggtgcatgaaatgtggcctgtcctggaggagtgcctgtaagtggggcaaggggcccagccgtgccccggagggtgccaccatgactaggggcagtgtgggcagctgggcagaaaggcaggtgggtgagaggccatcctgatcctcactgttctgtgtctaattcaaatactctgcactgcaagcccacatggtagatgctatgatcatcccccttttacacgtatggaaactgaggctcatggagatcgagtaactttttaaagatcaaacagctaataagttgcagagctggcctcagccctgtcacctcacctacttggccccagtcctcttctcttgtcacatggggatggggacacatagctatgctcatgggactacaatacggcctcctcctctcctgagacagggattgggaggtcggggagagcctccaatctctgaggcctggcaggtggggattttcttggccctgcaacatctgcataagtcacagacttgcctgggacccagaaaccacttcctgtgccccagccagcccccctcccgcccagtgccacagtaaaggtcggcacctgtaggtccaggtaccccaccctgcctgccccatcctgggcccagggcctcacctgcagctgcgatggtggcatggggttcaaggaagaagaggaggcatgggccccgcctcgaagatctcggccctggaaggttccccctgggccccgggcccccagcaggtctgaggctttgggtgcagccctccagctgggcgaggctcctggggatgggccaagggccaaggaaggggccgagggcttgccaggcctggggttgggcatcgggtccttgtccaagggcaggctgcgtagacaataggggaaaggagtcacacgtgtgctagggcggtatgagatactcgaccacctgagccacgtggacactcctctggtcaaagcaggcattggctgggacatgtcccgaggggccccatagttgcaccccagctctagacacacacacacacacacacacacacacacaccaagaacacaggtacatgtacatacccacacatgccccacgtgcagaggtccagcacctggcttgcctgcccacgctagcacagccctggtgtggatgtgtcctctatgagggcaatggttgtttccccctccacttgagagctgtttcaagcctcaggcctctagccctccctgcaccctgcacaggctgtgtttgctcatcttgccggagctggtctcggactttctcctcggagtcctattttgccccagtgactaggcatggactcaaaagattcatctggctgctgtgagtggggctagtgaggaggctattgtaacagtcctggcaagtgatgatgctggcacagaatgggctggtggcagtggagaaggcgagaagtgggtagattctgagacttaatctgaagctggatcaggagcagtgctagcagcttggatgtagtgggcaagagggagagtcaaagtgacatgggttttagcttgagcagctggaaggaccgagctgacattacctgagatgggggacatggcggggagttggattgggtgcaaaagtgcaggtgtagatagacatgaagagtctggcattaaatatgtgagtggaggagctgagggggcagctgaatacgggggtctggatctcagggcaaggaggcgagtccaggagtgtgatcatgcacggatccagcatggcaagtgacagagaggaggagagatggggtctcttgagctggggcctgtagaagcttctctacccagcccccatcagagttcaccccaatttctggccctcaagcctggctcatgctacaccccctgcctcaaatgcccactccttctcctctttccctgtccaagccacgcaagacctgctcttctattgtcctcaccttgaaagccctccacaatggctccgggccccctgctgagccccagaaccttccactccctgagggaagcactggcttttcaggatcctataatcctggtctgagaggaagccagagctggaagggactgcccagccaaccccattatacagaaggggatgctcagatgccgagttccgtagtcccatagtgacttgagaactccacttctttctttaggaagtgtttccgtgtgcacattttataaactctctggtgtgtgtgtgtgtgtgtctccatctccccgttccacctcacagcactgagttgggcacacagctgctgagagcagcccgggggagtatagaagggttctgggggagcagttgctccttcctttctttgctgtcacctcctgggggtggttgtcagagctgtggtgctgagggagatgagtgtgagaatccaggtattaagttcttagtctcctgggggcttagaacattactgcgtgagaaacaggagtgtgggtctgtggaggctccgaacaagggcctgggagagcactggtgagatgagaaggtgagtgaatgaatgaagccagagatggggtgatgctccttcaagccaagaaataacaaagattgccagcaaccaccagaagctgggggagaggcctggagcagcttctcccttatggcccccagaaggaaccaaccctggcaacaccttgatcttggactctggcctccagaactgtgagatgatcaatttctgttgctgaagccactcagttgtggtactttgttatagcagccagaacaaactaataccgatttcggtgcaaatggatgttttccaccactctggcctggcccatgtggctggcctgtggtcacttctgaagctgcctggacacttggccagagctaagaattctccccaaacacatgtgggatggcctgactcagcaaagcatagatacattctcagacagggacatggagatgatctgtctgggggtagaggacctagagggccgggctgggcagccggcttcctgcactgtctgttgggacgtccctttctgactgggtttctcagaagctgaatgggggatgtttctgggacacagattatgttttcatatcggggtctgcatctgggccctgttgtcacagcccccgacttgcccagatttttccgccattgacgtcatggcggccggatgcgccgggcttcatcgacaccacggaggaagagaagagggcagataccccaccccacaggtttcgttccgagaactggctgccctgtcctgcagcaggcttggcccaggtggggtgacatgggtgctggtggatgtggtaggtgatgtccatctggccactatgacaagcccctagctctgaagacctggcccttcttgggttgtggagaggacccaggtttgaagctctgagagtgccaggcaggctccacagatactgggacccctggggtcttcaaatagtataacaccaggacctcagaatcatagaacagcatttcttagatttaaaggatcctagaatctcaaaaccacagactgtggggtctacggtcccaaagtctcagtatgtgtaggccagtgtccctggtgtccaaactccttggaaccatctgaaagtcaggcagcttgctgcttcatagggcctcttgcctaccaggcctggaaacagagccagcctccctagggcctcagtctccctgtccactctggaacaacgttcccaaatacatggccactccgccagagatggcaacagggggaggaggaggttgaggctggtgtgcctttggtctgggcctcatggggggagctggaaaagcctcagccttcgccaatacagagcccatcatcagactctctagaggggccccacaatcaaggttttcggggaccagcaccagctctggggacacacagcctgactgactgacatgcctccatcatcaccacgctctggccaactaggcctcctgacctatggagtccggggcctcacctagcccagctcttgtgaggctgggccccacactgtgatcgtggatcgtccaacctgtgggaagttggggtccaacgtgtgagaaggcagaagggggaatggtagcccaggttccccttcccccttctgggtgctgaggggtaaactgaggccttcagttggggagagagccagaaccagggtcccacctagagtcctgagatctaggcttggatttcaactctgccgctgcatttcggtgaggccctgagatctctggtcttcaatttgcccttctacactgagcacggagaggcgtggagtagacaagggccagggcccttctacgctgtctggttaagtcattaggtgtctgcagggcttcaagttgacaattgcccctctatccaggggactggctgagagatagggatacatagagacaaagagacacacacaaagagcgagcaagagagaacaagagatagtgagagacattgagagaaatggacacatgcatggagagccagagtgcatgtgtgcgagaggaggattgcctcaaataagaacatttgctggtctctggctggttcaactgatgctgcctgaaataatcaagaataaagaagggcaaggtgccagggacacccatggctgggtattgaattgtattgcaaagcaacaatcagcaaaacagtgtggccctggtataagaacagatactggggaagagaacagaatagaaagcttggacatggacccacatatggagagaactgaatttgtgatgaatgtggcatttcaaactggaggaccatggagtatggtttaacaaatgtgtctgagataattagggagaagataaagttattgagtgaatagtcagtccattatcccaacaacccctccctgcccagtttgaaatgtcaccatcatcatataccctaaaatgcccagatccattcaagatataagttttaacacctaatgctgatcttgggtttattgtgtgtcaggccttgtgctaagtatttactgtggttaaaaattttaatctaaacaaagactcctgaggaaggtactattataaccattgcagtacatatgaggaaatggaggtatggagaggttaagtgcctggctaaaaatcacacatagggcttggggtgacgctgggtttgtcccagacagtctggctccagtacccacactcttaacctctatagtaaatggaaaaaatgaagccataaaagagactagaagccaacataggtgaacatttatctcattttcaagtaggaaaggactttctaagcacaaaaccagagacagaagccacagaaaaaaagactaacctatttgactgtataaaaccatcataagcatcacaaaaaacaccataaacaaatagaaaaaaagcaaatgatgaattggggaaaatatttgctatatatgtaatggctgatgaaaggttaataaccattccaaataaagagctgtggcaaatcaataagggaaaaataagatgaacaccctattaggagtaaggacatgaccagacaaccaaaaaaaaaaaaaaaaaaaagcatgaatggccaatgaatagtaaaagtaatcacaagatgcaaatttcaacaatgtgataatgtgtttttcttacctgtcatgttgggaaataattaaaacataataatactcacctagggttagcttaagtagagggagcataaaataggacaaccttttggaaggagaattagcagagagggtcataaactttaaaaatgcacgccccctttgccccagcaactcccttttcaggaatccaaggaagcagtcagggatgtttatagaaaaaaacgagaaacaaccggaatgtccaacaatcggcacttggtcaaatcaatcaaagttcatgctgatgtgaggacagtcttgtccatcatgaaagatcatgtgttcaaacaatttttagtaagcttcaaaaacactactgttaattgaataaagcaggaacaaaaccaatatatagcatgattctaatttggttacagaaatactaatagctaacacttcgtgagcacttactttgtgccaaacgctgtgctaagcctgcagaatcgagctcaccccagccctgaacaacctgtttgcttcctgaatatggactctggtcacacacatgcagtcctggggtaggtccacacagctaaactacggttgacaatggtgtgaagtgctccctgcccccccgccccaagggtctcctctaaagcgatacaagcaaagttcagttaagtgctcagcttgccccggcaccttgcaatcctcctgctactagggtgaacagaactgatgctcactctcataaaatgtaaaggtcctcggcgacattactattattaaacgccagctgtgtacaaagctctaggctggatgctggctgggaaggcaggtgggggaaggcaagaaaagagagcgggagagatggaggaaaggagatcgatggagtgtggtcaagatggaggagacagagataggggagatggtcagaggccaggagagatgcggggaaagagagtctgagtgtagcgacagacagatggcgggagaaagagaggcagagaaacatgtaaaagagcaagacagggtgagcagagagacagagaaggatgagaggcatcaagagctaagagacaaagagatgagagagatgcagttgaaattttcagttgcacctggacagcatttcaagttgttcaaagctctgaaatccataaagactggcagctgacatattttaaaaatcctatccatctacgtatcaattgatgaattcatttatttttgcccctgcccatgcattaagtacttcacctttaagtcttctgccatttattctattattatttttttaaagaccttacctggctggaatcacggtagctgggtacatcccactgtaccagagggcccctgacccccccgccgtgcctacctccctgccatctcctccaatggggcccacatctggtaggggagagcagggacactcaccttggtgaagtggactgacagaaaaggatcagcctggcttgtgggaaactgtcacgtatcaaaaacaactttgcttttataccgagaagaaaaaccacgctgtacggtgtggaagccgcagacctctctcttctaataatccaaatttttttcgatgagtgtgtgcgctgataatcacggggtgggggggggttctcatagttttttttttctctctctctgtgtttctccttttcttgattatgagacttaaacggaaattttgaaattttgggtttttttctttgccctttacgagtcatctgaaaatatgatttcttcccctcaccacagaggtgagaggtatcaatgagataatagggctcatgagaaaccacagtttttaaaacaaaagtgtatagagtttgaaaaaaaaaaaacaagggaaaagaactaaaataaatcacagggccaacccgaggcaggcagagacaccattctgtgagtgagaggatatttgagggtctctggggaaagaaagagaatctgaagctctatgtgtggatgggaaatgccagggaaagagacagaatagggctgggttcccagaggcctcgccctactccaggcctcagtttccctatagatggaattgatatggtccccattgcttgaactacccggcgaggggagttctgcaccccctgcaacacccctcccacagagggtgaggggcatgtaagttacttcatggaggagaaagcggagagcccactgtcatcccctaaaattcatggacttgaagagtcggagaatccctggctcccagaatctactgacagttactgaatgaggaaagagagaaaagtctcgcctcatcacgttttagggcttgagtgccctgacccagccactgtcccactgggaaggtccctagcaggtccccaatattaatgcatccatcctcacgatgaaccccagaggcccattgggaccctgaccctcttgtttcaggaacatcatggcctgatgcttctgaggccctcagcctttggggtcttttacttcaaaaagccccagtttccaaggatttaggattccaaatatccgccatcatctcagtagctgatgtttatcttgaattttccatgggtcagatacagtgctgaacatgtctcacaagtgatcatgttcaatcctcaccatggccccttgagctccatctcatcattattgtattcctgttatacagatgagggaaacggaggtataagtagtcaagcaacttgcccaagatcacagagctggcgagtgtgggtcccgctttctttggtgctgggctttgaaatccccaagctttcctgaacttgatgttctcaggttttaaattctaggatgtgatggcagggagatcctgggatttggagagtccttggagacttgaagcttgtgaggcttttaggttgtccaggaattggcggctgcatctcttgacctcagcaggcactctattcaaccactggtcagcatggtagaccagcccccaggggcttctcctgacaggccatggtgaagacttccagctcccagcaccctgcaaagcccagggttctagtcgtccaacaaccactccagccctctacaagactggcttcagacctggggaagagaaattggaaagggctttttatttacatggtacaaatctggtggccaagatccaccccttcacccctttgccccctttcctcccccaaccttctaagccctcgtaaaaaggagggcctctttcctcaactcagactcacccttctggaaaagcccagaatgggcctgatggcctggctttgtgaagacaagaaaaaaaaaaaaaaagaatagaaaaaaaaagaccttaaaaaaatcagccaacaacaattaaaaaaaaaaaaaaaacacccaaccctccccaccattagttcaaaacaaaactttcgctggttgaggcttctgagttggtgggacacatctgagacccaaaaatggcttgggtgtgttggacagccaggggaggcaccaaggtgggatgaggtcccctgcttggaggcctgcagggaccctgtgaacagcaggtgtttaacagatgtcacggcatgtgggagggagcaagggagggggtgaggagcatgcatgtcaggaaggagtcctggggagctgattctagtgatggccccaaggttaatgaccccttgcagtgatggtcctaaggttaatgatcccttgcactgatgttcccatagttaataaccccttgctccctgcagacttgggtcggaatgttccctacacctcctgcgtaattataaaccaggccagttctatcagcagaggcattgttccctgccccagcacctgtccccctcctggaaaagggggctagttttctctctcaggatcagaggtgtgggctgcattctccttataccttccccagaccatctgtcccttactgtcactcactccatgaaagagagtggccagagatataggaggcaaacgaagtgaggatggtggccgagaatgtgagctggccccttgggcaggcccagggtgtgagagggaaatgctacggctgctgaaagccaagatccttgcagaatgggggctggggtcaggagggcagagaggggtagaggtcgctacctcccctctatactggactatatcctctctcatggagggcttctcgggaaggagactgggagggctgggagttgggggtgagtaggcaagattaaacgggtcaggaaaagtccccagagacaggggcctctgacaaagacttgaaggagatgagggagggagccagctagatatctgaggaactccaaaggaaacagccagggcaaaggtcctgaggtgggaatgtacctgatttgttcaaggtctacaagggggctggtgtggttagtgtggagagagcaagaagagaagctggaggtgaggtcagaaaggggactcggaggttagaccacgcaggaccttgtaggccatggtaaggactttggcttcaacgctgagtgaggaggaaggcatgacagggttgcaagcagaggagaaacacaaaccgtgttaggatttaacaggaagcccctgaatgctgagtgtacaatggggtctagggcctgaatgtggaagcaggggaccagcaaggagctggctactgcagtagtctaggtgactggtgatagtgctggcagtggaggtggtgagaagaggatggatttggtaaatatttttaatagacagccaaaaggatttgttgaagactgagagtcttggagccagatcgggacagacaatgcccaaaccaggtgggcaggaaggagtccctggactatttgccagcttgaacttttaggtgagaaaaaaataaagttctgtcttgcttaagcccccattattttatgatttttctgttacttgcagctgaacatattcatttctaactcatggacatcctgaacatggagacctggggagaggggctgctggaaggatcacctccctcctaggatgctgtgaggttctaatgagataacagcatgctcagaacctggcactcagtaggtgttcagtaaatcttcccaggatggagaaggaatgtatgaatggatgtgttcagcggacaaaagctgcagttgagttcccacagaaggtgagaccccaaagggagagcgaaaggagtttactagatggaagcagcagaaggaacagcactcttgggagagggaacagtagaagcagagatggggggacagaaagaagggaggtgaggcccctgtggggtgtggagtgtcaggttgggcaagaaggacagggctttgattgtgattccattagtcagaagctacccatatgcccaatcaacttctggtagcacacagtcaggtcagtgtttgctgagctgaaatttaaaaaagtgaatccttcagaaagttaaatttcctattcggccattcattcaacaatagtatcaagtcctggagagtgcttgcggctaacaatcaggggcattcttggcttgtggcactgctcaagaaaaggttgtagttgggcagggaggacccagtaagtaactaactgcaacaggacagtcattttcactttcctagttcacacaccaaggtgtggtctaggccttcaggggctctgggtattcctggggcaatggggagtcacggagggttagggagagggtaaccccatccctgagaagcacatttttcctaatggctgcctgcgttctatggttctgctgtccggccacccaatacctcagactctgtctacacagcgtcctcctctccagcctccttattggctactcatgcctcccttcacaccacctacactgcccccgtcggctctgcttttttccccatcttgcctccaagtcctccctccgtcccgctgcactatctagcctcggcattggctcatcccatactagtactgtcctttgaggtctctacgccttcaccctggctccctcattggctatccgccagctctcgtcctcgctcccgccttcagcctccacctccattggctcggctccctacacacccgcctcttggtctccttttagccttcgtattggctagctccaccttggcaccaccccttcgaagccgcagtgcacgctcacaagcctccccattggctcgctgcagccattgtcgtcatcccacgcgtggctctccattggctgttctctctctctagctaccgttccaccgcctacgcaacccgcgggatctcccactttttgggcctctgcgttcgttcccggctgccctcatcgcctgtagccattccacttttcccaccgcccacatgcctctctcgctcagacttccgcattagctgtctgcttctgttttcttcatcatggatttcgcaccacccccattccggcctctccattgattcctcgatcatcccgccccctacaccgcccactcccgggcatccccattggctgcgtgcttctccggctctcaattcgctgtacgtcatccgtgcatggctgcccattggccctctgcaatacttgtcttcatctcaccgcctatgcccccgtgagccgtacccctccgcgctggccttcccattggctgcccgccccttcaggccctgcccccgccggtcccgccgccggtgccgtcggtgccgccgccgccgccgatatggcgcgtacggcccctgtggagcccccgctgcggcattccgcgcccccctcgccggccgcgggtgagccccgcacctcggtcgaggcggcggtggccccgcggagggtgctgttcgccgacgaggccttggggctgccgctggcgcagttgcgccgctaccggccgtggggcgggcccggggcgggcaagatggcggcggcggccgggcaagatggcggcggcggcggcggggccgacgaggacgacgatggcgaggatggggatgaaggggaggaggaagaggaggcttgccccgagccctcaccgctgtgccccgtccccgctggcggggggttttacctggtccccacattttcgctgccgcccgcgccgggccgtctggagcgcttggggcgcgtcatggtggagctggaggcgctgctgccgcctcccggagcggtccccgggggtgccggggtgtgggtgcctgggggccgcccgccggtgctgcgcgggttggtacgcgtgctgaaccgctccttcgagaaggcggtgcacgtgcgggcctcacacgacggctgggcttccttttgcgaccacccagcgcgctacgtcccgcgcagcccgccgtgggcaggagcgggaggaacaggagcaggagatcccatcctggatccggggctcggcctgggtcccggccaggcatccgcctcctcgcccgacgacggcggccgcaccgaccgctttgccttccagctgccctttgctgagggcgcgggcgatggggcgcgcctcgacttcgtggtgcgctatgagacccctgagggcactttctgggccaacaaccacggccgcaactacacagtcctgctccggatcgcacccgctcccacacccactgatgccgaagggctgccccagcagcagcagctgccgcagctggagccacagcccgagtgccagggtcccgtggaggctgaggccaggcagctgaagagctgcatgaagccggtgaggcgcaggtaatgtcagccagcgccacctccgccaacgcagggctgtgtctgggatggaggacaagcattccggcccaggaacccctcaggcctgctctccaggacagggaggagggtgcattgagtcagtcagtcaaagagtgatggaggtcaaacacgtgctaggcactgttttaactggggttttattcctccatttattgagttccactgtaaagccctgaacaagacagacatctaccctaccctcaaggattcatacaggctcctatgggagacagtttgaaaaaacaagcaagcaagcagataggataaatagggacaaagttagctgctgaagggagtaaggggatagattgggagggaatgactgtgtcagacatgctgttaaagggagggcctttgaggaggtgagtcccgaatgatgataaagaagagttatgcagatacggtggggaggtgggggagagtttgtaggaaaaggaacagggaggacttttctgaggaggtttcatttaaactaagtcctggatgatgaataacagttatgtgcatatatggaacaagggtgttctaggtagaggaaacagcaagtgcaaagtcctggggtggaaatgagcttggtgtgaatgatcagcagtgtgctggagtggagagaactgcaatgacatagtgtggaccaagggctttgccagtggggggtagagcagattctctttctgacagagcaggaaaccaggattccagaggtggagaaactggttgaggcagtgatggcacctggctcttccagttcacccatgcctgaccttgaagcctgtgcactctactgttaacgctgtaatctacttttgagtcctgtggaggcgaggggctgagcccatgctctcacaagaaagcagtggctctagcagagagacagaaccagatgggtactggacttgaagtttttgtcccttgtttttttgccacaccacctgtgatcatttagggacagggagaaataatcagttataccccagggggccccagaagatttccctaggtttcctctatcaagctatgagttctttaagggcagcagctagtcctgattctttttgcggtcacctaagtctggcccaggatcactagattctccctaaaatgtatacatttccctgttcctgggaggactgggaatggaaatgggaaaatgctttttggaccttgtatgtatacgcttggtcagaagcccctggctgcagtaagacatttgtgggttctgctggttctggtaaggccttaggctgtgagtggttcagaaaggtctagctccggtctggtgggcagatgtgcctgggtaactgagcaggcaggcaggtacccactcacccacctgtgagccccaccataatctgagacttcatttaaagggggcaggcagcatggtttttcttacagcattaagagtgtggattctggcatagattgcctgggttcaaatcctggcgctgccacttactggccttgtgaccttggccaacgcatttaactacaccatgcctcaggaccctcacctgtaaaacagaattatagcatctactttacgggataagagtaaaggtgctcagaaccgagtctggctcaaagtagtatcatacaggtgttagctagtgtcagtatttagggagccacacctacagtttcctggattcctctcctaaattcggctccgcccatcagctgtgtggccttgcctccgtttccttctctgctaagggaaatgacagtcactttgcatggttggattgaatgcagcaaacatgggcaaggtaactgaagcatggtggtaactgcaaaagataactggccagcatttactgatttctgtgctatgaacatcagatccattctctccgtgaggcctgctgtgcatgctgtgttgtgtaggtgctatgattatccccatttagtagaggggagacaggtagctcagagagatgagccagcttgctcaaagcctctcagctagtgagtgacagggccagggaagaaatgctagggacatttatttttttctatttttttttttttaaactggtcctctagaaagcgtggcatgattcagggcaaattctggatttcactcttggtgttcccagcatgtcgtgctttccttttacctttttttttttttttgctttatcgaggtatacctacataaagtgtactgatattctgtgtatagcccagtggatttgtacatatgtatgcacttgtgtagccaccacccagatgaagatactgagcaggtccagtaccccagagctaccttcatttctatcactttcccaagctgtcatccccgccggctgtcatgggaaccctgtctgtaagatgcgacagtttgggtaaaggagtttggtcattttaaagagtgtgaaaggcagagaacagagaaatcaaaaccttgcagggccaaggtgggtggagagggtgtttttcttttaacatacatgggcggttttaaggagaaattgaagcagcctgttcagacaattgttttggtatctggccccaggtctgtggttcctaacatgacttgtgatattattttaagtgggcagatggctttttgatagcttctttatctttcgatctcagctcttgcaaaggggaggttggtgctcattgcaagatcagcgataagggtttctttgtaggtcggtggctttcttggtgagtacatttcaacatattattgttttagaacctgtgtgctgccagtgacttgcagcactgttgaagactagccaccctttgtgacctagccctcttgggaaatggcggaggatctcagggtatatcccttacctgtgggagccctatcagagggcttcctgttgaggaaatgttggctgtaggccctctgtgcactgagcacagccacatcaggtgagggcatgggagaagtccgtggtagccatcaggatagagttcagaaacccaaatggctgctttccctgggttgctggaccaggcatttggtaactctaaagcttagagatgattcatcgacaagcatttattgactgcctactgtgtgctgggcacagtgctaggttccagcagggaaagagatgcagagtggtcctaagatgtcacagggcttgtgggatggagtacagaggatttgttgtatgagacctggctgagcccctgctcttcgccaggcacttcactgagtactatattttcatgcaaggtctggtttaattccgacaacattccctgtgaagtagagggttttaaatttctctttcctggatgagcaaactgaggctcccagagtccaaagtcctagggctggtgtggggaaaagccctcctgatcttccttggcacttgacactaccctttggaagtgtcctattcttcttaaaagtaaagaccaagagagcctcaccatggtcttcaagcaccctcccatcccattccccaatctggcctccactggctcatagtcttaacaccagtggtctttctgagctcctgtcaccatggtctttctgttactccaaagggcctcgctcctttctgctgcagggcctttgcccctgctgtttccttcaccaggaacatttatcccgtaccccttgcagtctcctccagtgttgatccctcagttctaagaggacttccccaggggagcctgtccaccccagtgtcctcgggcccctggctttttcatagcactcatcagcccagcacgtgctaagctttgttagagaatgtcccatggcagagcagatgaacatcgccaccagtcgaggggtcatcggccaccctgcctagcagttctactatatttttttgatccactcgtttctcctctgaagtgactctttcaaatgttctttaccttcagactttctctcctgcttcaaaaaacaaaacagaagccataagaatggaactccctataacttgtggcccccaagtctgcacgctgatttccctcccctgtgttacagatgacgaggagtcccttcttgctcaggccacttctccctcctgtgctctgggtcccagtttctgctacttgctctagaatctgacatcatcagtcaccttttctctcctggcaggttttctgctgccctccttgcttgatcctctattcacctttgcctgtgccagcatcccttctgtctccgctgaccccacgttctctccctcctgcttctggccagcacctcatcaccctccccttcactgctgacccctgcagagttgcctgtacttgccttctgcacttgctcacccccgtaagtgttagcccccggcatctgccagattctgcaggtggttttttagttttcctcttgaagtggttgaccactcctacttaaaacactttgtcttcccttgccttgagaccacactctgctggttttcctcttaactctctggcccttctctttctcctggctcttcccttagcttcatgtatccaaactcggcatctccacttgactgatggcccaaataattcctcaaactcaccttgtcggggactgcattcatcacctctcccacagtgttcccaagcagcctctcactcccctacctccccacttgctcgttttgcttttcagcatccttaagtaagccctgcctgaccctgtagattgggccagggacccttattctagggcattctttccttttctaaaggcactgatcgcagtttgtagttatatctttattagggggttgctggatgactctctgccccgctagactgtaagctccgtgaggggtagggacatggtctgctttcattcaccactgtattcctgcaggcctgccacagtgcctggcacttagcaggtgctcaataaatgtttgttgaaataatgagtttgagtatttttttaatgtcttcctccatactgaattgtaagcttcctagttgggtttgctcaccatggtgtctccaggatccgtcactggggctgatgcacaggaaggcccactgtctttcagtgcacctataactgaagggatggggatccaacctgctatctgagttggcagcctcaggggaaaccagaataactggagttgaacgggacaagtcaggggcatcttagttttctgtagagtgaggaattaatgtgaacgtgatcctcttttatgccacagaaaacttggtagggcattatggttaaggacatgggcctgaggccacgtgctaagaaagtggcagagctgggatctgagcctgtgtggtcctgctctagtgctccagctcttagctactgtaccaggctgggtgatgcattttaccagcagggcaacactgggcaagttgctttcctttcagagcttcagtttccctcaatggaaatttggagggggttactgttaagtgctttataggtacttttcaaatatttctttgatctgctgaacaactcactgatgtaggtattattatcccctccttagagatgaggtaactgaggcacagagaggttaagtaacttgccccaggtcacacagctgataggtggcagagctggaattgttcaaaattgcatatcctaaccctttattgagttgtgaaatcaatttactgggtttcaacaagcattaaaaagaaaaaggaaatagcataagaaatgccagtgtatcaccacatgcagtaaaggtaagtattgtttcactcgaagaacaaccatttttcagttatttatatgtctgtttacacgtgtgggtgtgctgggttatgatgtagaatggatttcttactatgggtcgtggccaaagaatgaagtcatggctgttgaagaagctcatggcacgagaaactgctctccctctaccccactggatcacccgcaagtcccagagttgaggctgacacacttgttggggaaggcaaagcagtgccccacataacttggtggct

SEQ ID NO: 1151 - DNA, 39568 bp, Mus musculus
gtgcttgcccgaactgggtcatgtgctgagccccaaagggaaacacgcacagcccagctcccatggagacaatctgatgatgctgtctggggggggggggggggggcgtggcttcaagatacttggaattctggtcagcttaagtcgtgtgctttgggggggtgaggtgaggaggctgtgacatcatcaagttatgtaggactctgccctgctttctctgagtgtcagcctcaactctaggacttgtgtgcattggagggcagcttaccatgcatgcttcaagcttcatctaactgacactcccgtggccacagcccagggtgagaaaaccatttcacctcataagccagcacattcacgagtaaatacagacacagacacactgagaactgaaacacttgctcttcaaagtaatactcacctctactgcatgtcaaactgcgctgggctatctcctataccatttgccaatgtttgttggaagccagcaaactgatcttgcatctcaataaatgcccagaaaatgcaatgttgaatagtcccagctctaccacaaatcagctgtgacccgggacaaatttcctcatctcttgtgccctagtctcctcatctataaggaagaaatggtagtaatacttcagggagcttttcgatggactgaggaaacatgcaaagcaccaataaagtgcttaaaactaagtcttttggaatagcgctggggctctgaaaaaaggaagcaacttgtccggccattcccagctgtaggccccatccagcagcctagcgctgcagttctcaactggagcactagcagaactacacaggctcacatccctgctctgccactttgctgtgcagcctccagcccacaaccttaaccatgatggcctaccagttgtctgtagaacaaagggacactttctcatgaaatcctctctccagaccacttagatgattcccaccccacccatttcaactctattgttctcatttctgtgaggctgccaatagctacccattcattcagttacaggtatacctaaaacctgtgcatcagggatagtgacaggagacacactggtgagcaaacccagcaatgaaatttagaatttgatgtggagacatttgaaaaaatactcaaactcgttctttcaacaaatatttattgagcacctactaagtgccatgcactaaggcaggcctgtgaaaatacagtggtcaccaatgcagagcatgtccctacccctcacggagcttacagtctagcattgcagtcacccattaatcccctaataaaggccttactacagacggaagccagtgcctttagaaaaggaaggaacatgctagaacactaggccctggcacagactagaatcagcaagggcttaaggatgcttagaaagcaagtgcatgggtatggaataagaggttgtttgggggcactgagtgggagacagccaagcttgagaagactaaggattcagtcaagcagacaccaagtttagtagttgaggctgacagaacaggagaaagggccagagattttgaagaaagcaagtagagggcggtcccaaagccagaggggaccgagtaggagcagttagccctttcaagaagaaaacaacggagcctttcagtgtggccaaagccagggactaataaaactgcagacaaagcaagtgctgttgactcttcaggggagggggacaagggtgatcatcaagtactgaccagaggcaaagggcaaggtggctcagcaattaagagagagaccctggcctgaggctaggtcaacagaggaccaggtgagacagacctggaaaaaaagcctgatgaaagacaaatggggcttatggttgcagcctctggacaaatggcagaaaatgaagctctggagtcaagaacagaaactggcctgaaatgggaacaagggaccccctcctcatgtacaatgtgaggggtgttggtgttcagacgtgggggctctaaggagcaggcattccattcttatggtttctattgtgtttgaagaagcaaaaggcagagtgtaatgataaagaacacttgacgggatcccatgaaagaggagccgagggtggatcaaaggacacacaggacaatggggcaggatggaagatggtccttaacttgggggaaggctcacatgctggcctatgtggcattttccaacttgacttgctgatcagtgctatgaataaaactggggacttaaggaggctaagctgcgcaagcttccttccctaaggaaaccctcttagaactgaggagtctccatgaggagaatctgaggggtaaacacattcttggtgaagcaaacagtatgagcgacaaccccaaagcaggagtaacagaagggatgtggcgacaagagctcgggagcagaaaccaatataaagccagactagatgctaacagaggctgaagcaggcatcggtgagggtgtgtaagggccagccagatttttgttggtctttatttttaagaggaataggatacttcctcagagtataaagccaagacacaccagaagggctccttcccatatcagtccaatcactgaggactcaaaacctctgtgctcacccagaagagggatttaaaggaatctagctcacagaaaacgctgttgagcacaaatgaaactatacaaaaatactcagcaaagtgcccagcaaggaaagggggcttggccacatatcacttggtagggtctcacataacccttgccccctggctctaccccaagctcctgggagtcttaggaccagtctgtgtcttctctgcttgttcctagcactgtgctcagcacataacaggctctaccaaaaatgctgctgatggattctctctaaacctactgagtactgcaaacctggtcctgcaagctagggaaagcagccagctcagcctctggactacatcctcatggctgccaatcatctcttctgaccctacctgccaagggccagctgcacagtgggcctgtggccaacgattctgaagccctctacagcaggcctcccacagataagaaaagggatcccctgaggtccaccaccatttccccagagggctggatcacggggggtagctattcttcaacagcacttcaaatcagcagcagcacacaggccttaaaacaataataagttgaaatgtatttgctaggaaagtcaccgacctacaaagaaaaccttatcgctgatctagcagcgcacaccagcctcccctttgcaagagctgagatcaaaagataaagaagctatcaaaaagccatctgcccacttaaaataacatctcaagtcacgttgggaaccacaaacatggggccagctaccaaaacaattgtctaaatgaactacttcaatttctccttaaaaccacccatgtattttaaaagaaaaacaccctctccacccaccttggcacggcaaggttttgatttgtctgttcccttcctttcacattcttgaaaatgaccaaacttcagtactcaactgtcttatcttccagaaagggctcccacaactgccgatggaataagaagtgattgaaatgcaggcgattctgggggcactggaactgggtggcggctacatacacatacatgtgcaattcttccgagccatgccctcgggggtcagtaccgtccacttgtgtatatctcaataaaacacgaagcacacgtaacaggtacaggggggaaaggaagaactaagagcgccaacagtgaaatgcggactttgtttttaaactagcatccctaacatttcctccctggcctggctatttactagctgagtgactctgagcaagctcgagcacctctccgagccccccaccccaccccatttcccatgaactaggactcaatatagtgcctacagtcaacagcacattcagctgacctcaagaggagaatgtccctaccactcttaacagagattaagaaatgctgcccaccagaccttttacagctacaattatgcctcagttaccttccctacgggtactgcatccaattcaaccacacaatgggaaagccattcctctctgaccaatgaggaaactgagacaagagtacacaacaaagctgagtttgggaaaggatacatggactgtagtgagcatctaagcttcgatgctaattaccagcactatggcactacttggaactaggctcgatcctgagtgcttctgctcatcccgtgaggtctgtgccataacttcctgttttacagatgagggtgtttatctacggcacgatgcagctaagaattggatacggtcacactaaaaagtggcaggcttagggtttgaacccaggtaatcgaatggcagaatctaaatgcttcaaggtccatccacgaagagctaaacctttcacagcctaagcccttaccacaaccagcagatcccacagcaccctgctccatcatgcagcttcgaagggacaaaagggcaacctccccttcccatttctcataggagcaggaaaatgtatgcatttcataggggctctaactgaccccgggcattaggcctagctggagcccttgacaaacgtatagccctggtaaagacctagaaaagcattatatcagtcagtttacaagaggtgtgcaaaaaaaaaaaaaaagaagagcgatgtgaccttcaagtccgcttctcatctgtttccgcctctgccaaggctaatgtttttatgtgagaatagagcctcgctccctaaactccactggaggcctcagactaccagaggaacagtttttaaaaaaaaggatgcatagacttcaaagccagaaatggttgaaactaaaaagccaagtaccaccacttcctcaaccagtttctctaactctggcttcctgctgtggcagataggaatcagactgactccccacgccgggagacccttagtccacaccttcgcacgtcatgttctctccactccagcacactggctgacagtcatacgaaacccagaaccacctcaggactttgctgtccccactatctacatctacctcccctgtatgtgcatcactgctccgtaccactctggactcaagtttaaatgccacctcctcagaaagagtcctacctggtccaaactctaccaactcgctcgtccataactcttcgttatcaccgtctgggactcttcacaagagctcaccctcaacacgtctgcagcagccactccctccagagccttacagtattttcctctcagcactaaccttagccctatttatcttatctgcttgtttgcttttgcattctgtttcccagaggagcctttgcgggatggttggggacagggaaggtgtctgtcttgttcagggccttatagtggaactcaataaatggatgataccccagaatttaaaacagtgcctagcacatgtttggcctgcactactctttgaccgaatgcaccctcctgcctgtcctggagagcaggcctgggggagggggaagtgctgggatgggaggcttctacatccagccctgtgttggtggaggtggcgctggcagacattacctgcgcctcaccggcttcatgcagctcttcagctgcctggcctcagcctccacaggaccctggcactcaggctgtggctccagctgctgcagctgctgctgctggggcagcccttcggcatcagtgggtgtgggagcgggtgcgatccggagcaggacagtgtagttgcggccatggttgttggcccagaaagtgccctcgggggtctcatagcgcaccacgaagtcgaggcgcgccccatcgctcgcgccctcagcaaagggcagctggaaggcaaagcggtcagtgcagccaccgtcgtcgggtgaggaggctgacatctggccagggcccaggcctagcccgggatccaggaggggatctcctgctcctgttcctcccactcctgccccaggcgggctgcgtgggacatagcgggctgggtggtcgcagaaggtagcccaaccgtcgtgtgaggcccgcacgtgcaccgccttctcgaaggagcggttcagcacgcgcaccaacccgcgcaccactggcgggcgtcccccaggcacccacaccccggaacccccgggaaccgctccaggaggcggcagcagcgcctccaactccaccatcacgcgccccaaccgctccagacggcccagcgcgggcggcaacgaaaatgtgggcaccaggtaaaaccccccgccagcgggaacggggcacggcggagagggatcgggaaaagcctcctcttcctcctccccttcatccccatcctcgccatcgtcttcctcatcagccccgccaccgccgccatcttgcccggtcgccgccgccatcttgcccgccccgggcccgccccacggccggtagcggcgtagctgcgccagaggcagccccagggcctcgtcagcgaacagcaccctccgcggggccaccgccgcctcagccgaggcgcggggctctcccgcagccggcgacgggggcgcgggatgccgcagcggtggctccacaggggccgtgcgcgccatatcggcggcggcggcggcggcaccgacggcaccggcggtgggaccggcgggggcagggcctgaaaaggcgggcagccaatgagaaagccagaacaggggggtggggctccagtggagcgtaggcggtgagctagagacaggtacggccaacagccaatggacagccacgcgggagtgacgtacaggtgattgacaagcaggagaagctagcaaccaatgaggacgcccgcgcgtgggcgggatggaaggcgggatgataacggaatcaatggagaggcctgagtagggttaatgcgggcccgaagatgtagcagcaggagtatgacaattagtgggaaagtctgagcacgaagggcatggtaggcggcgggaagatgaaatggctacaagcaatgggggcaacggggagcgaacccagaggtccaaaaactgggagatccgcaggttgcgtaggcggtgagacgtaagacagataaaatgaacagccaatggagaactgcacgcgaatgatgtagagacagaatgacgataatagttgcaatgagccaatggaggagtctagtgagcgcacactatggcttcaagaggtggtaacaaggtagatctagccaatacagagactgaacagagacgggaaggctgtgtgtgagcagacatggaggcggggctgtagcgggcgggggggggggggagcactaaggcatgtgaggagtgaaggtgggagcgagaaagaaatggggatccagggtgaaggctgttatatctcaaaggacagtgccagtatgggattaaccaaagctgaaactagagaaatgtagccagaaggaaactttggaggcaagatgggaactcatacccacggatggtagtgtaggtgctgtgaaggaaagcatgagtagccaataaataggctgagttggaagaaggtgcataggctgagcctgagctattgagtgattgagcgcagaatcagaattcattcaaccagtaagatcggacctctggggaatggctttacctttccctaatcttccatgactccccatggctccacgaatacccagagcccctaaaagcccagactgcaccggattgtgagaccaaagcaaaacagttctatcagttactgggtgtgtcctgctggccccacaccaccacacacacctcccagccttattgtgaccaatgcaactagccatgaacgttcttaactgttccttaaagtccccagttgagcattgatgttcttcaggacttggcactattgcatgaatcaatcgcaaaataggaaatagaacctttttggaagaattagctttttccaactcacacttagcacacattgactgatagtatgtcatcacaagcttatcagctaatgtacattcaaatcagagtcctgcccttcttgctcattttgacactttgcaccccacagtggctttcttctcccccccccccactttcccaatctcctctgcttagagtgctgtcccatctgtttctttcatctagtgaattctttccattctccctctgagatggcacctcctatgggaatgacctggactttgccatcgtgttcattcacatatcccccactcccatttactaacttagtaagacttagtgtttgccatatgccaggttcagggagtgcttttatctaaccctcataagacccctaacaggaaggcccccacagtctctctgctcctcctgtctgtgtccagggtcatgaaaggaatatgtccagctacaagtagcagaagaataatggcataatgaaggtagaacttttttttctcatctgaaagttcaaggcagcaagtgctctcaggactccatcctatctgcccattttgggtatcaactgtgccccggtcttgcctcagagtctcattcttcagcaaatcctgcaggttatctacccaacgcattttccaagcaggatatggtgatgtatgcctgtaatcccagcactcaaggggctgaggcaggagaatcacggaattccaagcctaggctacaagtgtgaccttgtctaaaaaataaaaagggttaagtgtagctcagcggtaaaaaccacttcctagaaagtgcatgggccccatctctagcatcattttttttaaatcccaaatccaccttttcactaccactccatcaacaggaccagcaccagtcccagtcccctggactactgtagtcacctccccctggttggtctccatcccatgttctaccccctattccatattcagccatctaagacatcctcttaagtcctaacagcaatgtctctcctctgctcccaacaccctctggcttcctctacactaagaggaagagccaaccttcaccatgtcgtaagcgcacaagccagctagccccgtctgaccttcctcctgttctctcccttccagtcatgtcactccaaccacacaagactccttgctgaccctgtacatatccagcacactcacctcaggacacccacactgacccttctctcctggatctgcagatctccccatcactctcttcttcatctatgcctgctctttgtcaaagatccctttccctgggaatgctccccctgacctgttaaatcctgccccattcaccatcaactcctagccctcccagtttgcttccccaggaacctacatgagccaatatagtaatggtggagaggaaataccaccctctgacaagcaaaaccctagccaccatgctgcaaagaccctagctttacacttcagtaaccttaacactcccgcacccacagccccattcaaatagcctcctggaaacctgtgtcacttacccctcatttacttatcctgccacctctctgaccaagttttcgcagaatggcaggaagatggtgacgaggatataaaggaagatgcagaccaaaccatggaccctgagaaaatgagtacctattccaaaaagagacaggtgacagggcaggggactagaactgtctcagagacatagaagatacagggactagttgggcccaagtgtacagggagcagggaccattaactttggggcatagctacagtcagctgcccattacctgttaggtatgctcttcacccctcccctattccctcccacacacaaccacaactgttaagctcctaagatccatgcagacctccaaagtaagaggacctcatcccacctctgcccctccctccctctcaactcaggacctcccccggcttccaggcaccacacaggccatgtttggtcttagatgtgtcccaccaacttagaagccccaaccagtgaaagttttgctttgaactaatgataggaagggttgagggttttttttttttaattgttgttgttgttggctggtatttttgggtcttttttttttctattcactttgttttcccctcttgtctttataaagccaagccatcagttccagtcttgttatttccaaaaaggtgagttaagatgaggaaagtcagtctcttttttgttgttgttgttggggcggggggaggtgctcagaagatagccgaaagggacaaaaagtgcaaatgagggaaagagcaaaggagtgtgggaattgtttactaggttagcatcatgtgaataaaaacgtatttctactttctcttcctcaggcctgaagccagtcttgcaaagaggtggtggtggccatgcagttggatacctggaactcttagctctctgcaggatgccagggcaccaaaggctggaagccttagccgtgccttgtcaggaaaaactctgtggaggctcgtctgtagtaaacagtggttacagggagccggtctgtgccaaatcgaggacacgcagctgccagatcttgaatacaaaccttaaaacctcacaaacatcaagttccagaggagtctccaagtcctagaacttctatgacactgttggcttcaggaaaactggtcacttcagagcccaatgctaaggacccctatttcccaaaattgtgatcttaagcaagctgcacctccattttgcccatcggtctaaaaacaatacagccatgatgagatggacctcagagggtgagaagtgtttggctctgtctggaatgtagaaaattctagttaaatgttggctaccaaaattatgacagctgtttagaatcctaaacctttgcaaacgggagtgtttctttccttttgtttgtggttttggttttttgtttttgtttttttgtgttttttgtttttttctttttctttttacacggaatctggctatatagccccaagcaaccttaaactcttgattcttctgcctcagtttctggggtgctgggattactggtatgtgatactggatgaaactggaacttttcagagtagactgttacaaagtttagaatcatcaggctatggctatattgttcctgacaggactaggaccctgggccgctatgtgtatggtttttttgtttgtttgttttaacaacccagagccttgtgcgtgttaaacaagcactctggcactgagctgcaatggccagcctttcttccccttgcccttcttggtgatgctggctgcattaacagccactggggctgttcccaggtgggtggctgctgggtcagggcactcagcacaaacatgatgtggggctcactcagagactcgcagcagcttctgggagccagccattctgagactctctgattctgtgaatttgtggggggagtacagcccacttttttctccatgaattgctttccatgcctcttgccttctgtggaaagaaaggctacaggagtggccagctctgccaagccttggcaacatgatggtggtgatcatatgcatgcttgctaaggaaatactgaggtttggagcagaaggaagcctctggagacagagcactaccccacctctcccctggctgcttcccattcacatggcaggcttcagatcccttcttctgttcaacccagcgatcctccaacgtctcacaaacacaatgctgtctctacctgcctcgggatgcctttgtgatttgacttattttccctcagttttttttttctgactctacacacttttgtttaagaaattgtggtttctcatgagccctgttatctcattgataccttttacctctgtggtgaggggaagaaatcatattttcagatgacttgtaaagggcaaagaaaaaacccaaaatttcaaaatttccgtttaagtctcataagaaaagaataaacaaagtaagagagcaaagaaaaaaaaactacaagaaccccccccccaccctgcaattatcagcacacacactcatcaaaaaaaaattggattattagaagagcgaggtctgcggcttccacgccgtggtttttcttctcggtataaaagcaaagttgtttttgataatgtggcagtttcccacaagccaggctgatccccctctagcagtccacttcaccaaggtgagcgagtgtccctgctctcccccaccagacacagctctgctggcgaaagtggcagagaggtattgagggtgggtgtcaggagcccaccagtacagctggaaacacccagccactccaggtaaggactttggaaactaataccattcatcctaaatgccagataggtggagcagttggtccttagacaggggcaaaaagaagtactttgattgtttgatgcacagataaacaggatttttttttaacatatgtctatcaactgctggtctccaggaatgccggagctttaggcaactcaagatgctgtccagctataactagaaactagaagtgcatctcttgtttcttttcctcctgctgtcttccatttcttctcctgtctccccctgcttctttgcctgtctctgccttccatcagtgcccagtctctgtctctttcccaggctctgactatatgcctgtctgtctcttccagcctggccagccacagtccctttctttcctcccgctctctgactctcggctcatcttccttcagctgcttttgcacccggtattgagcgcagatatttgtacacaactggcgcttaataataatggcttaagagctctgttttccaagaacgggcattagttctgtgtgtcttaggtttgtgagctgtcaggtcagtcttagcatttaactgaccttctgcttgtgtcacgcaagataacaccctcagtcagccacagtttagcaaaggactatatgactgtgagcagaatccatgtgcaaggagagcaggcagttcaggacgagggtgagctggtctctgcaggtttagtgctgtggcactgtgcctggtatatggtgagttctcactgtttgctattagcatttttaaacaaattagaatcgtgctatagattggatttgtttctgctctgttcaagcgataccatttttgtagcatactaaaataacgaacacgtgatcttttatgtctgccgtgactgtcctcacatcaccatgaatttgattacctgaattaagtgctgatggtgggatatttgggtttcttctgattctaaaactccatacctgactccatggatcctgaaaatggagtagctggggaagaaggggtgtacatcttaaggggttttgccctctctacaaattgcttttccaaaacgttgtcttattttctgttgtttctattcaagttaattttaggtgtgtgttaccatttttaatccttccccatcataagaaaaatgacaagtattaaaattttgcattttggttacttttaatgaccactgaccatttgtgctctgtaggctagagttttatgatcacattcttcatcctactaaattgctcatgatttttcaaaattgctaatagctcttaatttagaaaggataataactattggctatatgtatatgacacatatttccctgaaattcatcatttgtgtgtatgtgtattttaattgtattcatttacttagtttatgagcatgcatgttcttcctgcatgtgcaccatatgtgtgcctggtgcccacagaggccagaagatggtgtgggatctcatgggactggagttacagatggttacgtgggtgctggcgcttatgtggcttctttctatggttttgtgtttaaaagccttttaccacttgaaaatgagaagctacctcctctacaagagcagcagtgctcttacccatggagccatctctccagccctatttgtatggggggggggggtcttctgagacaaggtctcactctatagccctgactggcctaaaactcactgtatagaccaggctgacctcaaactcacaaagacccatccatctgcctctgccttctgagaagtgggatagaagacatacaccaccacggcgggcaatcacttgctttttttccctatttattgtgctttgtaatgcatgtgtcttttaggtctttagattactcttttcttgtggggcttctgtgtatggttttgtgttttaagtcttttgcacttgaaaatgagataactgttcaccccatgttggcttccagtctcctttatggcttcattttttccatttactgcagaggtcaaaagtgtgggtatgggagccagactgtctggaacaacctagcctcaactcaagtcatctgtgtgaattttacccaggctcttaacctctctgtacctccatttcctcgtatgtactgtgatgattataacagtacctacctcagaggatctttctgaggattatttttattaatgatggtaggtgctcagcacaaggccaaacaacaatgatagacattaaaacgtatctctctagtgggtctggaaattattctagagcgtctgatgacagcgacatttcaagtgggcagggaggtattggtgggaaagtgggctatctacccagtcactttattttcccctaattgtctcagaatcatttgttaatctgtcctgcactgttcctcatgttgaaatgttgtgttcatcacaaattccattccctctgtgcatgggtctctgccacggttttctactctaatctgctccttagtgtttattcttgtacaaagcccacactatttttctgatgttgctttgcaaaacaattcaataccagccatgggtgtctctggcacctagcagcatcagtcctccagccagaggccagtgattattttcagtcctttctctcactccctctctctctgtctctgcatgtctgtctgtctgtatatgtctctgtcttgttcattctttctctgtcacttttcctctaaactgctctcactgtctctctctatgagcttgattcctattccatctcatgtttctctctatatatttctctatctgtatctcttctatatctgtattcacacacatatgatatatatatatatatctcaatatatatatatatatatatatatatatatatatatatatatatatatatatcaatatatatatctcataccataccatacatacatacggctatatagctccataagatttaccccagccacgagacagaaagatgctggccttcctccacctcgtactcttccctccccagtctagaagggcaaactgggctcagagatgagcagcccccacccccaggcctcacagagatgttgtgtcagagttaaatccaagagcagatctcagaattctcagtgggaccttgactttggcaattccacattgcaggccttagtttacctctcaggacccaggaggccattaacaggagacctgaggtgcccttccctcttctacatcctcatgagttggatccagtccataaccatagcatggggccaaatctcacaagctctggtctatgtgaggttctgggccccatgagtcagaagtcctagcggaccaaagaacactagtaacgatggagaaatatcagttaagtatgaaccctcagagttcatactgcattccttgggacaaccattctggggcccttccaaaaagcctggtggtgtgctctttccatgagggccaggccaaatgtcttcttcctcttgtccctgtatctggaagaatgttataatttggggaaagttgtcccaggagagcgggtctggagccatatgtaagtgaccatttatcagtcatagacacttgctcagcattctgtatgtacgaactttgcaagatggctcctgttactgtcccaaattagacaggaggacagaaagaccccagccttcctccatcacatactcttcccagtctagaagggcaaactgggctcagagatggacaggaaggcccctttgtcccaagagggcaaagcctgaccccagatcaggacagtagagggttttccaatcctctgtcataatggagctcaggagggagggaggctgacattccagagccagcaagaggccttatggagttttaagcttcctggctttaggtggttcccatttctttgggctctgggacatcaatacacacagtaagaaggtggatccatgcaccctacagagtctgtgttcttgagattctaaaatccgttggctttgagaaatgatatcgtacagttctgagtttctgttactacagcatttgaagactcaagggggtctcaatatccatgaggcctgcctaatactcaccaagcatccaaccttgggcccctctggcatccaagaaagacagaatcgatagaacttgggttttgcatggtagccagatggacgtcacctaccacatccgctagcacccacatcaccctacctgggcctatccggctacaggatagactagccacttctcggaacgaaacctgtggggtagattatctgcccccttctcttcctccttgttgccgatgaagcccaatgcatccggccgccatgacgtcaatggcagaaaaatctggccaagttcaggttgtgacaacagggcccagatgtagaccccgataggaaaacatattctatgtcccagaaacaacctccatacagcttctaagaaacagtcaaacaggaacgccccaacagacagtgcaggaagctggctggccagcccagccctccaggtccctagtaccactagacagaccatatccaattcaggtcctctttctgagaatgtactgatgcatcacacagtcacaccagttccacaagtatttaaggaggagatttcttataagttctgaccaaacataaagagcacttcaaaagtgaccatggtccagccatatgggttaagccaatatagtggaaaattctactcaccaaacctgatccgcatttgcttgagctactgtaatgaagtatcacaaactgggggacttacatagcatagaattatcatgttagcgttctggaggctataagaccaagatgaagacgtcagcagggttgattcctcctgtaagtcctggcctccttctcatctctgatgctttcctttgctgttctttcttggaggagcatcacctcatggctgcctgcctgcagtctttcagctcatcgcatcacggttctaggaagccagtctcagcttccacagacccagactcctcttttcatgctaatgttttagcccgtgacacactagtcttaatacctaggttctcatataaatctctcaactctgataagccccagacatgatagcaaagaagatgcaattgccttccaaaacccttccgtgcttcccccaggctgttctcagaagctacatgcccaacacatgtagtatatagtagaacggagaatgacatattcacatgcacacacaaacacagcagggaaaatgtacatatatatacttcctagagaaaaatgaggcagtatcagcctgaaatggtggtttataatcccagtactcagaatgcagaaacaaggagttcaaggacagcctgggtatataaggagttccagactacaagaaaccctatctaaaaagaaaaggaggtcccaggccatgagaagactatagaattctgaacctggctatcctcttaattaaaatcagggtagaattctatagtcagttcaagatctggttccctctctgactggaagtataggatcctgaaaaacgaaagccacacttttaagggactgtaaggtagtgaggctcagcacagggacctgggtcaccatgtagagctttgaagaggaaatcagaagactgcagtatggctaagggaagaagtggacttccaagcttggcagagattggagctagtttgaggagcgcccagggaccctcaatcaagcaaccctatccctctttttttcctggcacctgccacgccaattccaagacagaagaaagcttagagaagacagacccatgctgtggccctgagctctgcagtactgaattcagctgcaagtcttccctgcctctactgcttacctttgcatttagccacatctgactatcactgtatactctgctcctccatcctctaccctccatctccagtaatgctcctgttgtagctgcttctgccaaaaacctagacatcatcttgaccctttctctcatctcctccatccaagctcccggcaacttctcctgactctgccttcagacgagacttggaagacagtcacatctcagcagctcctctgccgttatccaggttggtagcagcaacaccactcgcctcactattgcagtacacttcccactagcacagttccctggagccttcctgctcacagcatccaactgaatcttgtgaggctatgcccaagtcattggaataaaaagatgagaagagagtccaagacaagccccagtagaatcagcaaagactatgtggcctgcacagagtgcagggggtactggagggtcccacaaaccaactccccatcaccccacattcacgacagagtggtatggtgtatgtaagcaagtgaggtgctggacatgtgcatgtgtagaatatatccatcaatctgtgttcctgctgtcagggtagcatatatgtatgtaagacagaccagaggtgtagttatgaggctatcttgcaccacccctggaatgcatgtgactccattccactgttatccctgcagcctgcctctgacaagaacccaatgcccaaccctaggccagccaagcctatggctccttccttggcccttggcccatccccaggagtcttgccaagctggaagactgcacccaagggctcagaacttctagggaccaggggctctgggggacccttccaaggtcgggacctgcgaagtggggcccacacctcttcttccttgaaccccctgccaccatcccagctgcaggtgaggcccggggcccagaatggggtaagcagggtggggtacttgggcctataggtgtcgacctttactgtggcatgtggcgggggggggggggggggctggggcacaggaagtggtttatgggtcccaggcaagtctgacttatgcagatattgcagggccaagaaaatccccactctccaggcttcagagattcaaggctttccccacccctcccaatcctcatcccgataggagaccttatgattccatggacatagccatgtatcctcatcccactgtgacgagatggctggggcccaagaaggtaacagtgttggggccagctctaccccttgaaactgttggaccttgatacattcactctccacgagcctcagattccactgatgtgaactggatagttccattgttgctaccgtgtgagactttagtaaagagctaatgaatgagacacagaactattaagatgaggctcatggcatctcatggcatctcccttctctctccagctgcctacagtgcccctagtcatggtggcaccgtctggggcccgactaggtccctcaccccacctacaggcccttctccaggacagaccacacttcatgcatcaggtatggaatcggagcaggctgggaggagggaacaaagaggacagctgtggagcagagccccaagccccgctgagccatggtccatgtgttccccagctctccactgtggatgcccatgcccagacccctgtgctccaagtgcgtccactggacaacccagccatgatcagcctcccaccaccttctgctgccactggggtcttctccctcaaggcccggcctggcctgccacctggtaacaccttcacagtatctccaagttctctaatctttgagcatgtgcaatgtaaacttttctgaattatagccctatggaggtatagaagggtcttaagagtcacggaaactccaacctccaaaaaaaaaaatatcagacttagaaccttgaagacatagaatgcaaaaaaaaccacaaatcgctattatcagtcaaaatgccatcacttaccaatgggcatctttaggctgttatgtcagaagcccttgactgtgggaacagcagagtactatgagacagagtcttcaaggctcaggaaggggaggggccttctggaacaagctgtagagtctaacctgcagctccagaagtaccctgtctctacccacagggatcaatgtggccagtctggaatgggtgtccagggagccagctctactctgcaccttcccacgctcgggtacacccaggaaagacaggtgagttggcagggctggcaagaaacggcccctgcccacacctcaccccacccctgcacctattcctctgctgacatcccatattctcccatccccagcaaccttttggctgcaccccaaggatcctacccactgctggcaaatggagtctgcaagtggcctggttgtgagaaggtcttcgaggagccagaagagtttctcaagtgagtagcctgaccctacccacagagttctgctgtctaggcttcacgtctcaactcaccatcctctcaatggatgataataagaatcataaagattcagactccatccctccctggctctgtgatcttgggcaagttatgggtctctaggcccagtttacctcgcatgtatgaagagacataataataaaggtatgtgctcatagttaccttcctgttacacgcagaaggatctaaggccacagagaattaagggtcaatcaagctcacacaggacctaagtgatgaatcttgaatatgaacacaggcagccaggttccagagcccacacgcctaactgctttgtcccgcttcccctcacacaaaacacattcctgatcctccaatttctgttcctctagatgactatagagctcttgcctctctgctctctatctgctgtccctccccttctgtatcttgctagtcacccctaacttttggcaatggtgcgtgtttgcgtggccaggcctttgcatgggctgtgcctgacacctgaaatgccatacccctgcatacctcctgtctaacgtcatcccagcattttggccagactcaaagggtaaataagctcaggcctggcagcccagagttgctgaagcacatgtgtttaaggcaagcaagggggtgggggggggagcactgagcatagagaaatctcccaaagggtctaggccgtccctaactgatacactaagccaagaggcctgacccaccatggtcagctacatggaatcttctccttactcaggcactgccaagcagatcatctcctggatgagaaaggcaaggcccagtgcctcctccagagagaagtggtgcagtctctggagcagcaggtaatgcctgcagggtgtggctgcggggtgtggctgcgggaaagaaggatgggagggaggaccctgtgagggaaggcatgggcaaaagtgtgcctgagaacgaccaggtggaagccccactttggtgtacatccccacagctggagctggaaaaggagaagctgggagctatgcaggcccacctggctgggaagatggcgctggccaaggctccatctgtggtgagtaccccaagtccagaggcagcagacttcaactgctgaggggcaagacaggagcccataaggaccaaatgtcttcttctcacatgcaagccctgccctgtacagaccattcccacctaattaatatgccagatccaaagacacgcctactctgcttacaaaccttctgacctccaaaacattatgattctgccttttcagggcacatacagaaggcagtgaactcacagggccactgcaaaaaaggaaaatggagggccttatgttcaaatttcaagataagctcagaacatcgaacagtgtgtgaccacacatttcacatacccagtctcaggctgatatgagtcttatactataacagaggtagctaccaccatcatcctaatgcacaaatgaggacaacttaggtcaggaagatttagttgatgctcccaggttcacagttggtgctaggggattccaattctgcccctgctcaccccagccctagcatctatggcttcatcgcatgctcatgcctgtactctaagatgctgctttacagagctccaccagagcctgcaattgactatagggtggtgcccttctcaaaagcattgaccttactggacacagtggcatgcacctgtagtcctggctactggagaggctgaaggaggagcacttgaaccctcaagttcaaaaccagcctggtcaacacagagacaccctgactcttctaaaacacaaagaaacacggttggggagaaacttgagagggaaaagtgattgccatacaaggataaggacctgagttttgctgggtggtggtggcggcggcgcatgcctttgatcccagcacttgggaggcagaggcaggtggatctctgtgagttggaagccagcctggtctataaagctagttccagaacagccagagctacacggagaaaccctgtcttgaacacctctgacagaaaaaggacctgagtttagatgccagcacccacaccagatgcagcactgtaaatctgtaatcccagcatgtgtacacacaccacacatacaaatcagatagaaatatgaccaaatcaggaaatgcaaattgtaaaataaagtggggttggggaactggacagatagctcagggattaagagagcttgctgctctttcaggggaccagagtttggttcccagcaccctcagagccgctcacagctatctctaactccagttccagtggatccaatgcacttttctgccttccacaggtaccaggcacacatgcgatgcccagacatgcatgcaggcaaaactcccgtatacctaaaataaaatgcaagctgacttggcagtaatctcagcccatcctgtgctacatagtacatgttagactagcctgtactacatgctacatagtacatgttagactagcctgtactacatgctacatagtacatgttagactagcctgtactacagagcaagagcccacctacataaatatccaaccaagcaagcaatcattttttaaagtaaaatggaagactcagtgtggtggcgcacgcacgcctttaatcctagaactcgggaggcagatgcaggcagatctctgtgagttcgaagccagtctggtctacagagcctggtctatacactgagctccaggacagccaagactacacagagaaaccctgtctggaagaaaaaaaaaatatatatatatatatatatatatatacataaaataaaaagtggaagccagatgtggtggcacacacttataatcctagcactccagaggtagaactaggctagaaggtgcaaggccaactagagatatatagtgagactgtctcagacaaaacgaaaatgaataggcaaacactcaggaggcagaggaagtgcatctctgagagctgcaggccagtcagggctacatagtaagaccctgtcaataataataataatggcaataataattttaagaccaaaataaatagacatggatgaagggggaaaggaatgagaagaaggaagataagcgatgagggaggagatagggtgaaagtggtctgtatgtattacatacatgtacaaaattgtctaaaaacaagtttaactaataagaaaatacaaactaatgtttgaaaggctacaatgaaatgacaagcttaagtgtctcgattaccacacccctcccaacccctcaggcctcaatggacaagagctcttgctgcatcgtagccaccagtactcagggcagtgtgctcccggcctggtctgctcctcgggaggctccagacggcggcctgtttgcagtgcggaggcacctctggggaagccatggcaatagttccttcccaggtcagtggagtccacaccccagtgccagggggtacaaaggagctcccccacccccctcacccccactaagagctgggaggaaactgcacctgagtttattaggcttagaagccctcaactgttataaatgcatagccttgggccccgtgttttgggggattggagccaggcctgacctatttggcatctgctacttcattcagtcaccatgagggaggagcctggccaagtgagtccaaagagccctctcttccgtccccacctccaggaagtcaggtgcactcaaccaagctaaccaaccctctcccacctgtcaggcctgggttgtgagtttaccagggaccatagatatttggtgtcaggctggctatgccacttgagctgcttacatgcctttgatgtacaaattacttgactcctttttaaagtgaggagagctatttggcaggagtactgcaaagaagacacagcttacggcgggtactcagtaaacagtactatgtgtgagcatagactgtccctccccccttggtgctagtggtaggaattgagaccttggattcctgatgcagacaaaggtggggtagggggtgaggaggccaaaggctctgatctatgccaaccttctgcagagttcttccacaacatggactacttcaagtaccacaatatgcgaccccctttcacctatgccacccttatccgatgggtaagcagggcaatagaggcccagcagctggtgggcggcagggggggagttgtggtggggagtgcttgcctcctacattgcaccaagagcagaattcacccattaacaaacctcagctctgaggagccccaagatgtgatccttcttgatagcttcacctcagatctagccctcaacccaaaactactgcaagccaggtcagtgcaaagcaaactgtaacactacaaactaccctttcctttgtccaccctatctctaacatcacccttgacctcatgcctcaccctattctttctccttccccttgacccacaattacaaagctatcatagctcagagggccgagagtaggctgctccctcagccacaaccctgaggaacatgccccttattccacctgactccaacttccaggccatcctggaagccccggagaggcagaggacactcaatgaaatctaccattggtttactcgcatgttcgcctacttcagaaaccaccccgccacctggaaggtgagttcctctgtacacactggcagctgggatggctccaaggatggttagcctggggctagacatgtggggaaggagcaggtcagtctcagactcaggatgactgtcaaccctgtccctgactggggtcccggtcccccttccacagaatgccatccgccacaacctgagcctgcacaagtgctttgtgcgagtggagagcgagaagggagcagtgtggaccgtagatgaatttgagtttcgcaagaagaggagccaacgccccaacaagtgctccaatccctgcccttgacctcaaaaccaagaaaaggtgggcgggggagggggccaaaaccatgagactgaggctgtgggggcaaggaggcaagtcctacgtgtacctatggaaaccgggcgatgatgtgcctgctatcagggcctctgctccctatctagctgccctcctagatcatatcatctgccttacagctgagaggggtgccaatcccagcctagcccctagttccaacctagccccaagatgaactttccagtcaaagagccctcacaaccagctatacatatctgccttggccactgccaagcagaaagatgacagacaccatcctaatatttactcaacccaaaccctaaaacatgaagagcctgccttggtacattcgtgaactttcaaagttagtcatgcagtcacacatgactgcagtcctactgactcacaccccaaagcactcacccacaacatctggaaccacgggcactatcacacataggtgtatatacagacccttacacagcaacagcactggaaccttcacaattacatccccccaaaccacacaggcataactgatcatacgcagcctcaagcaatgcccaaaatacaagtcagacacagcttgtcagaacacgctcgtgtgcacgtacacacatgcagcccctccactctatctcctgagttccatgaatacacaccgactctccaagatgtaccccacgtctcacttgccactgaccccagttccctacccacaagccccaatccatgcctaagcgtggcccacagaagaacttctcttttatttgggatccaaggcccctggcccccagtgcccatccaataaactgtggtcagctggacaatcaccctgatcagatatgggaacatataagcagacagctgggtttaagatcccagcaggagaaagcggataccaaatgaaagagagtgctagaacaggtgcctcagcactgtctccagcaccccaaattcctgcctgtggttaggagacatccatcagggctctaggcctctcggacccggcccaagaggccagcattctcctggcgaagggctcggtagtcctcacagatcttctccaggttgctcaaagtcttcttgcccatctctgtctcaatctaagaaaacaggatgcacacttcttcagcccctgcaggctgcccctctactgaactcctccctgctcctcctattcccgtaacagcagcctgttccttcccatcactgggcttctgggtatgtccttccctccactccacctaaagcagcaacttctgccatgggctctgggaggcattaggagccgcaagctaaaagccagggctcagagtaggctactggctagcttcaggtcccaggcacagtgggcacgaaggcaaagcctctagctgttagttgtctggtttcaaagactctcagcgcaaaacaaggaactatcccctggcctgtctccattccccttaccagtcccaggtctcacctgctcctcaagatctcgaacttccctcatgatagtgcctgtgtcctcaatggtctggatgagctgactgcaattctggagacagcaagaatacaaggcttgcacctatgctggccctctccagccaacccaccaggcacatggctcccctcacctcatgcagggcagctaggtacttgtaggctttccgaacagcatcatccttcttagcatcctgataagacaaaggggatctccgagatatcagcaagccattcccccttttccactactctatgcccctataagaccaccctttactagtactttgccttcatcctccacagagcaaagctaggccccaagcaacagtgcacctaaaggactcacagaggggcaggcaacaactcagtcccgcctccaccctcccggaggccagcctgctccataccttgaacacaagctcatcagtcactgcaaatgtccggtcgagcttcccagagagagagttgatttccttctgcagttcctttgtgtccgacaagatctggtagaaaccagggtaactatcagtgcacatcttgggcaaggtagctgatcagtgataacactcacgtgcctatacttacatccagtcagggcccatgtcgctgtgttggggtgactattatgtgttggagtgtgcctgaacagctctgcctagtagtgagcataaagtccctgtgtgatcacccctatgcttgtctgcctacatgagccatcaatcagagccacagtgacatcataccttagtgatctcttccttctgcttccggatgttgcccacaatctccaggatgcgctgagtataggccagccgggacacatcttttggcagagtctccagctctgacacctaggtgggaacatggcaggcgtgagcccaagccctataccacaaccacccttacaacccagggccctaaagtaggccttaccagctgcttatagacctcctccttccggcgagcctcctctgcagctgctcgaacactgtggtgcagctcctggatttctgccagccgtcgagacgattccagctagcaggaacccataggcagaaggcagtgagcagagctcagaaacagccccctccctcagccccctccctatctatcagggcagtccatctacactcagcccactgtgccacttacctccctacagtcctggagtcttctgaggtggcggtactcagcaagaagtgggacccggtgtttctcccactggcttgctagatggatgagcctctgagcgctgctctccaccacaagctggcaggagtcaaggatatgtcaagatgggctggatccatctacccacccctctcagcccaaccccaaaccccagcccacctgcagtttggcgaggttggcagccccatcaggcagcaattccaccgtcctgctcttcaggcgcagggcctgctcctgctcggccacactgagttcactttgtcggcactcggtttccacctggtacactcacagccaagctcccagtcatacacacagcccacgatcccagtgagcccattatggccctggcccagctcaagacctcagagaactccaaggcccctacctactacaggctttggcatcttcagctctgtactgacagccagaggctctgagaagccctgtaaggccctgcccctacacatcctccttgatcccctgatgcccatagctcctatgttcccctacaaagcctgactgatgccagacctataggcctatatagtctatatagacctatagtctagcaagccatcaaccctacatgtttctttgcataagttctccttagccttcaacaataccaaaggtctctaggatgctccataaacgattatggcatctatagatctctagatgtcagatcatctctcaaggccccagttctgacctggtccagcccaagtccctctctaagcccctcacctgcacaaggttgattcccagggtcttcatgtcagcttcaacctcttcaatgttgtggttcacactcgccagctgctcacgaagggactctaactcctgctcttgagctgcccgtgtgtcctgagaaacacacgccagtctaggtggagctaccaagtccagaagacaggcaatagcccagctgactctatgtgtgtgtctgtctgtctgtctgtctgtctgtcttggtctccttacctgttcaagcctttgagaggtagctggtacatctgccacctgagctgcctggacctggggctcctatgggtagaaaaagcaacctgactatcacacaaagttctatccctcccaggccagcctcaaacccccaaagcaccctcaagcactgtacccatgtccactcaaccactgacagttttcagattgttactacaagagaataaagtgccatctgtaactgctgattagagtgcctgaccacaaggaaacctccctgacaaccccgaccctataacctcatgattctatacccaccctgaccatcctgactctacaactaccatgacactataaccacctgaccatctggaccctatatccaccctgaccctacaacctcttcatgattctatacccaccctgaccaccctgaccttacaaccgccatgaccctataatcacctgaccacccggaccctatgtccaccctgaccctataactactctgactccataacgaccttgcccaaaatgtccacaagaaagatgagtgtctaaggagaaaagatgtttccaaagggaaaaaatttccaaaggaaagcccaaggaaagatggactttgtactaggagcacttcacactcttacacaagtcccacctatctgcctttcctccactaaagtctcaagaagctaggggagccatctagacaccctgtcctagttggagaggacctactcagtgggcaccagatcctctgtcagtaacagtggtatttataaagaaagcaatccggacacgccctgtccactctagcctacccaccagatggaaggtaaacttctctgaatgggtgaagcgggagcctttgggcacaccagtcatagccctagcaccccaggtctgcagcatctctcctaggtctcggacttgtgtcggggctccaagtgggccccagctttgacgcagatgttcaatcagctgcttgtgcagtctctgctgtggagcccgggaatcctcctggaaaggacagagggcaagaggaaggcatacctgctggtccctagggctggaacttcccaccactgtaggtcccagccctggcctaggagtgccctctctccacagctgcacttctctacccagtcacccctgaccctggggaagaaagtgactagagaggaaactgagcctggagctttcaaattagaaagagacagaaagatatggacagcatagacacaggaaaaaaaaagtaccaggccaaaaaaaatctagagttggggacaggaagataaagaaattagagttaacaatagagactgtgtcagtattaaatggtgctaagaaatcattcatttcattcagtataaaaacagtacagtggttccattaacaaaaatgttcctgtgagtaatgacacatctgagtactcagagctgaaattatgtgacagtttgggttcgctaggatttgatcctgaacacgaaaccaggttctaccatgaaactgtagtccaagctctgagattttctctaaaaccacagtggggaagctaaaggagaataaaagaagggctagaagacaagtatcattagagcgattcctctatatttacacatcaaacttcctgtaagtgtaaagaagagacgggagctgggtgtggtggcacatgcttttagtctcggcgctcaggaggcagaagcaagggcattatacattttgatgccagcttgggttatctagtgagacgctgtctcaaatctcatcccccacccccactcccacccccaccccccaaaaaagcagactgggcagggagggagaaagaataagcaaatggcaatcagggcggcagggacagatagaaaggcaaaactggaagtggacaggaagaaggtagaaagaagagaccagcagagaagtagatagggaggaagcgaggacagagaaagacatggaatggactgaggcggagaaagaaaaggaagaaataggcaaaagtgagacagagaaagatgaaggctacaaacagggagacagaaaggttgatagagtgcatcagagaactacagcacaagacagtgacaggaggagatggtgcagtcacctagagccagacaaaggagaatcactgacaaatgcacagtcagacaaactgaaaggctcaggccctgtccccacagggaatgcccccaacagtcccaggtaaaactcatgcaaggtcactactctacacccccatttttcagaaaagaagagcaggcaggaagggcttggtgtaggttctgcacttcttatccactctttcaggcagggagccaggcaggtatacacagagaagcaatgaagagagggccagaatggggggaaacgagatgcagagaacaaacaggagccgccagaaacaggagcctctcagggagagctgaactcaggcggtacctgggatgggacgcgggatgcccagcgcacccggtcttcatctcctgggcaatccctgttcacatgctggcagagctggctggcatggtgttcaaggagtgaggctgccctcccctgaagctggggcacctgtgtgggggctggtagcagcaggggactggcctggaactcccatagctctgaaggcagagacagtgtcagccatttgtcctcgcataccagtgttcacacaaggctctcccctcctcgcttagattcacacagctgcatcctcacctccgctggaattcaactcaggtagaaccaacctgctggagtggaacggctgctggagggctgagccctgtggggaaagcaaagtcagtgcctccagaatgaggtactaatgaaagggacaacaacctgatcaaacagatgacagacaaagaaggcaaggaggggacaagtccaaacggaggtggggattcccacctggaggcgctgcaccttgggagttcgaaggagaggtgggacccagggcagggccagctggtcccggatttggctcccaatggcccgaaggaaaatagccgagtcacctatgagggggcgaggggggtgggtagggaaggagtaacatgctaccaatctgggaagccagccataacacctgatccctcacctccagatgcagatggattcaactaccattctcagccactcagcactcactgagcgttaactacataggagtaccagttacccggttaaagaccacctcaggaaaaccaaaatgaggtctccatcttcatgagtcagcaagagaacagaaaaggaacttcaagaataggaccactagcaccatctattctaagcaggaaagagaaggatggtaaaggggagccggaacgtctcaacgaacagccagagaaagacctccttgacataacagagcagaagccacagaacactgaggatagatttaaccttttgacacttgggcatgatgttgtcatctacgaagttcatgctcaagaacagtgcaaccaagtcacaccaaaaaaaaaaaatctcctaacattttaaacacgtttacagttccagggtgggtggcgtttatagccatctttagcagcatgtgccccatgctttggactcacctggtagggagctgactatgaagagaactgagggaagaataattcagggaccaaaatatcctgaggctagctctcacctggtacatttggagaccactaagaacacccatgtgagaagactggagttagtgagtgtgcgagggacagggtaagctgggaacccagtcctcacgctgcttgtcttgggtccatctgttctctgacctctgatccacccaattctccagaagatatgccctgccccctacccttcctgacacttctctcaggcccctatcaccctgggaacacagtccatttccccagtcctataggaccccatacctgcaggctggtctgcgtcctcagaggcatcgctgggtagtcgctcagccaagaaaagaagcagatctcgaaggtcaggctcactgggatagaggaagttctgatagccaagctccaagggatagcccaggtcctgggggttagcaagtataagcacataatgatgctgaggataaaaaaaaaaacagacccccatctgccaagcagggaggtgcctcctgctctggaagccctgtgactaccataccggctctgtcgccttcactagccatcaccctcccacttttcccctgcatccccaaggtatccaggccccagtgacagctacaaagccaccctagacagtattacaagatcaaaaaacaaacaaaaaaccagacgttaaagctcagaagacagccagggctatacataaaaaccctgtctcaaaaagcagaaacaacaacaaaaccaaaaaaagcatagcattgctaccgaaatatgacgcaaaatccaaaggccacaagaggacacaggatctctgccctgtgaaaagtcaagagagcactgacgcttaggaaagcaatatccagagcctttgagagggaagccatagcccaatctattatataagcagtgcctaaaaataaacagaacaagggatgtggctcagagggcttgcttaacatgagaagaccctgggttccatccctagcactaacacaatcgtcatcatcgtcaccaccaccaccatcatcaacaacaacaacaacaacagacaaaatatatatatatcagcaaacacacagccagaaaggacggactctcaagagttcaagataggttcaaagacatacagaccctgaaagcaaacttcctggactcaaactcaagctctgcatgttaccgactgtgtgacccaaggccaatacttctctgtacttcagttctgtcatgtgaaaagaaaagtataccagtggctagagacatggctctgtggttaggagcactagctgttcttccaaaggacctgggttctgttcccagcaaccacatggtggctcacaaccatctgtaacttcagtttcatgggtgtgatggcctcttctgacatccaccattaccaggcacacaaatggcacatatatatacactcaggcaaaagcactcatatgcagaaaatttaaaaaaaaataaatccaaataagtaaaatgctttcagtatctttcaaaatgacactaaaagtactcatctcagacagttgtcacaaagattgagttataagcatgttaccacagtgcctggtacaaaatattgactcaaaagaagtcattccgatgagtattcatgcattctgtcaaaagaaagttatatccgaggatcatggccacacacgtataaaaacaacctgcttctatgctacgttatttaggaattttttatttgatatctgcaatcaaagacttgtgactgatacgaaaactcattccaggagtgtgctgttgtggtggtttgaataagaatcgcctcataggttcatagatttgtatgcttggtctcctgggagtgggtactatttgaaagggttagaaggtgtggtgttgttagagaaaatgtgtcactgggggtgggctttgaggttttagaagcccatgccaaccaagactagagtctttcttcctgccgccttgggatccacatgtagaagtctcagctaccacatctgcctgtgtactgccatgctccttgccacgatgataatggtctagacctctaaaactgtaagtaagcctcaatcaattgctttctcttataagagttgtcatggtcatagtgtctcttcacagcaacagagcacatactaagacacctatatatagtaagagatgccaaaaagagagaggtggcttaggtacagaaatagacaccagaagcaaggtatatacagaggaagacaccagaacacacagtgctgaattggagacactttctggttgttctggcaaaccatggctactgagctggacaattacatatgatatatatatatacatacatatatatacatatatatatatatatatatatatatatacatacatatatatatatttgtgtgtatgtgtatatatgtatgtatgtgtgtatgtatctatatgtatgtatgtatgtatatatacatatatgtatatacatatatagagatatatagatatatatatcccttaaccaccaggttctctactccacaatgaaatcaacaggagccacaagatcaaaaggcagacagcactgagaaggggaacatcagagaaagcctcagcccaccaccttggtgcttcccaccgagttcctttcaggcccagtagaagacataatttctttcgtctttgaaggccatcttccagaacatggtcccagatcaggggtggactgacagtttcatgggaccatggtctagaccatgtctagagtcctagacagaagaaagtgagagctcttgatagctaggcaaacctgagagtaatgagcaggataggcagagccaacagggttactgctcagaccaaaactgcataaacagtggtccaaggcgaacaactgtgatgacctgtcccctttagtatactggatggatactctacagatctaccatagacttacagcaatttattgagtattctggaaaaatcaacaatcactccatagccacaggctgctgggatacaggctgccaaagtatgtgatcaactattcctatagcaactcagtttttgctttgtgcatgctggagacttgaacccaagacctcatacatatgaagtacaaactctgaaactgagctacacactggttcactttggctttcacacacagccaacacagagaaactgaggaccaaaaaggttaaaaggcaggttcaaagctgcaaagacagtgagctacaagaaaaggtagacctctctgctcttgaccacagtaaatgggcacagctctgaagtgaagaggggtgggtgcttcatgagagcatcatttttggaactatgagaagcacaatacaatggaacagacaatgaccttcctcttccccagtcccattgatgaaacaagtaatcgcaggtccgataggatgcccatgaggtctgggcagagctagtcagagctttatttaggagaatgtaacccagtcaaggtcttccttcagccctaataaataggtaaatggcctactatgtgacagtggagtgagattttgatgtcaagcttagaaggtggctgttaacattagcctgagcacaaaccgaatcagctcatttaatccacacaagctcattatatcatctccatttcacaaataaggagaaggcatagaacagttagggtcacacagaaagcgtgaactgaactaggtagggtctgaactagtcacacagtttggctacagaggcagcagctttagctatacaaagggacagagaagaaggcaagtgtcaaagaacttggcgactttgtgaaaaaggaaggaagacagtgtgcacactgggaggagggcactcaccatgcaggcctgggccagactcatggccaggcggaagcgggcagacatggctggtggtagcaagtgactgaggccagagcccacatcaggattaatcactcgaaggcatcggaccacagcctctacgaccagctcagtggtgaaagctcgcagagtctgcacttctggaggaactgccctaaaaaggaaagcaccaggcttgagtagttaggaaacaaagtacagacttctagagagggaatgctctagaatccaggtcggggcagggaacaaccaaggcttcaacagatcctgggtgctggtgactatgacctttacttagtcctaagacctcggtgaatgagggtgacctgaattcagaaaagtctcaaactcccctacacttcaaagtttccaacctctgggatctgcaaaagtgaaaatggtccaagtggcacagtctccatatttctgggcaccaggacattgttctttgcatggcaaggcctcctagatctacgaggtttgggaaagctacataggaagaggctggagttttcagaagtctcaaatgtcagggtcaataaatagaaataaaaaatcgggcatcctaaattttggcatcaaggacttttaggtccctcaaatagtgcatcctttgtgttcctgtgttaccaagtgctgctactgtcagaatgtagggccctggtattttgataagtcctgggagtttcaggagttattgttcgaagatcaagttgccagtctcaggaattctggagactctgggtgccagactcctgtgttatcagtttcctggtgtgggtgtcctggaacctctagatatcaggatcccagcatatgcaggtctcagtttgtaaggtgtctgagtcctcgaggttttacccaatgtccacatcaaagtatttaggaaagtcatgatgttagagtgtaagcagggaggaggaggagaggcttcggaatcctgtaagtttgggcctttgggtgtcaaggtcttcattttaaggttcccgggtaatgggggtcctaggatttggagtcccggatgtgagcaattggaggcgactgggggttgcgtacttacgtgcccgcctggcgcaaggaatggatgaggattcggtcagcctcctccatggtggagttaattctaactccggggctgggtctaggaccagatcagagaaattggagctctccgcgctgctctcggcgcggcgaggacagagagtcacgtgccgcgcgaggaacattgggaaatgtagttctaaggagtgagcgttgcgcaggcagcggcgctggaggcggggtgtgaattacgtaatggctcctggaagttgtagttctttcacttgtagtcccatggtctcctccaagggaaaaaaaaaggaaatgggctggggagttgagagacaggacagagaaaaattttcatttataagacacgttcatcttccaagctataaaagtttatacgtgtacaaaatgactgttcccccgtgtcttgctagcctcatctgtaaagtgagaatttggataataccttcttcctagggttaagacataattgctacgactggggatgtgactcaggatagcctcacaacctgagttctctccctgagatccacatggtggaaggcaggaaatgacttgataagagtctgaattccacgtgtgcactgtgacacatttatgctcgtgagcacacacaaaaggatcataaatagattttaaataaataaaacaaacgtcattgctcgagtaaacctacttaaccaccaaccacaacaaactgaggtcgatcctccctgggacccaagagacataaaaagagaatggactcctacaaaatgtcctctgacatctacacatgtgcagcagtaccactatcatgcacacaaaatagatggaaaaagcaaagaattactagaccaggcgtagtggtaaacatctgtaatctcagcacctgtcccaagtgtagattgggctacagaaggagatcacctccttatgaaaccattccttattgaacagcctcttttgtctctactatccagtagtgctaacatttgtcataatcacacatacacatcacatacttgactcagtttctgaactaagctctctctctctctctctctctctctctctctctctctctctctctctctctttctcctctcgttgtgctatcctgtcttgctttggtttggttttcagacaacaaaatcttgcaatgtagcccaggctggcctcaaaattgtaataataatatttctttctcccaagtgctaggattaaaggcttgtaccaccgcccctgactgtattctatttttaattactgtagatttacaatgagtcttgatatcatatatggcaagccctcccatcttgttgtcttgttctttttcaaaatggatttggcttttttgttttttggttttggggttttttgttgttggtggtggtgttttggtattttgtttttgtttttgtttttattttttgtcatttgtctcaaagactgtcaattccaaagaaaactatgctgagattttgtttggtatagctaatgcagaatgccaagaagatcactttggggaactttacagcatcactaaatgttacatatttctccattttatgtccctttgatatttactatctgacttttttcctagagataaatatatatatatattaggtttttcctatgtacctcaagtgttatatgctattggaaaattataccttttttttttcgtattttggtttctgcctgcttggtgcagatatcgatttactatacacttaaccagtgcctttccccttgccaatctcagacctacaaatatcccatttgctccccctgttcaccctcccaactgacaccatttttccccgccccgtgaccttaatctctctaaggctgggagaggagagggaggactgtgtgcagatggtccttatatctcctgaggaggatgtcggaatctgaagtcgggaaaggtgagagaagccatccacccctgaagacccttgaagtgaccctgggctctggtccaccctcatcctctcacct

SEQ ID NO: 1152 - DNA, 39568 bp, Mus musculus
aggtgagaggatgagggtggaccagagcccagggtcacttcaagggtcttcaggggtggatggcttctctcacctttcccgacttcagattccgacatcctcctcaggagatataaggaccatctgcacacagtcctccctctcctctcccagccttagagagattaaggtcacggggcggggaaaaatggtgtcagttgggagggtgaacagggggagcaaatgggatatttgtaggtctgagattggcaaggggaaaggcactggttaagtgtatagtaaatcgatatctgcaccaagcaggcagaaaccaaaatacgaaaaaaaaaaggtataattttccaatagcatataacacttgaggtacataggaaaaacctaatatatatatatatttatctctaggaaaaaagtcagatagtaaatatcaaagggacataaaatggagaaatatgtaacatttagtgatgctgtaaagttccccaaagtgatcttcttggcattctgcattagctataccaaacaaaatctcagcatagttttctttggaattgacagtctttgagacaaatgacaaaaaataaaaacaaaaacaaaaacaaaataccaaaacaccaccaccaacaacaaaaaaccccaaaaccaaaaaacaaaaaagccaaatccattttgaaaaagaacaagacaacaagatgggagggcttgccatatatgatatcaagactcattgtaaatctacagtaattaaaaatagaatacagtcaggggcggtggtacaagcctttaatcctagcacttgggagaaagaaatattattattacaattttgaggccagcctgggctacattgcaagattttgttgtctgaaaaccaaaccaaagcaagacaggatagcacaacgagaggagaaagagagagagagagagagagagagagagagagagagagagagagagagagagcttagttcagaaactgagtcaagtatgtgatgtgtatgtgtgattatgacaaatgttagcactactggatagtagagacaaaagaggctgttcaataaggaatggtttcataaggaggtgatctccttctgtagcccaatctacacttgggacaggtgctgagattacagatgtttaccactacgcctggtctagtaattctttgctttttccatctattttgtgtgcatgatagtggtactgctgcacatgtgtagatgtcagaggacattttgtaggagtccattctctttttatgtctcttgggtcccagggaggatcgacctcagtttgttgtggttggtggttaagtaggtttactcgagcaatgacgtttgttttatttatttaaaatctatttatgatccttttgtgtgtgctcacgagcataaatgtgtcacagtgcacacgtggaattcagactcttatcaagtcatttcctgccttccaccatgtggatctcagggagagaactcaggttgtgaggctatcctgagtcacatccccagtcgtagcaattatgtcttaaccctaggaagaaggtattatccaaattctcactttacagatgaggctagcaagacacgggggaacagtcattttgtacacgtataaacttttatagcttggaagatgaacgtgtcttataaatgaaaatttttctctgtcctgtctctcaactccccagcccatttcctttttttttcccttggaggagaccatgggactacaagtgaaagaactacaacttccaggagccattacgtaattcacaccccgcctccagcgccgctgcctgcgcaacgctcactccttagaactacatttcccaatgttcctcgcgcggcacgtgactctctgtcctcgccgcgccgagagcagcgcggagagctccaatttctctgatctggtcctagacccagccccggagttagaattaactccaccatggaggaggctgaccgaatcctcatccattccttgcgccaggcgggcacgtaagtacgcaacccccagtcgcctccaattgctcacatccgggactccaaatcctaggacccccattacccgggaaccttaaaatgaagaccttgacacccaaaggcccaaacttacaggattccgaagcctctcctcctcctccctgcttacactctaacatcatgactttcctaaatactttgatgtggacattgggtaaaacctcgaggactcagacaccttacaaactgagacctgcatatgctgggatcctgatatctagaggttccaggacacccacaccaggaaactgataacacaggagtctggcacccagagtctccagaattcctgagactggcaacttgatcttcgaacaataactcctgaaactcccaggacttatcaaaataccagggccctacattctgacagtagcagcacttggtaacacaggaacacaaaggatgcactatttgagggacctaaaagtccttgatgccaaaatttaggatgcccgattttttatttctatttattgaccctgacatttgagacttctgaaaactccagcctcttcctatgtagctttcccaaacctcgtagatctaggaggccttgccatgcaaagaacaatgtcctggtgcccagaaatatggagactgtgccacttggaccattttcacttttgcagatcccagaggttggaaactttgaagtgtaggggagtttgagacttttctgaattcaggtcaccctcattcaccgaggtcttaggactaagtaaaggtcatagtcaccagcacccaggatctgttgaagccttggttgttccctgccccgacctggattctagagcattccctctctagaagtctgtactttgtttcctaactactcaagcctggtgctttcctttttagggcagttcctccagaagtgcagactctgcgagctttcaccactgagctggtcgtagaggctgtggtccgatgccttcgagtgattaatcctgatgtgggctctggcctcagtcacttgctaccaccagccatgtctgcccgcttccgcctggccatgagtctggcccaggcctgcatggtgagtgccctcctcccagtgtgcacactgtcttccttcctttttcacaaagtcgccaagttctttgacacttgccttcttctctgtccctttgtatagctaaagctgctgcctctgtagccaaactgtgtgactagttcagaccctacctagttcagttcacgctttctgtgtgaccctaactgttctatgccttctccttatttgtgaaatggagatgatataatgagcttgtgtggattaaatgagctgattcggtttgtgctcaggctaatgttaacagccaccttctaagcttgacatcaaaatctcactccactgtcacatagtaggccatttacctatttattagggctgaaggaagaccttgactgggttacattctcctaaataaagctctgactagctctgcccagacctcatgggcatcctatcggacctgcgattacttgtttcatcaatgggactggggaagaggaaggtcattgtctgttccattgtattgtgcttctcatagttccaaaaatgatgctctcatgaagcacccacccctcttcacttcagagctgtgcccatttactgtggtcaagagcagagaggtctaccttttcttgtagctcactgtctttgcagctttgaacctgccttttaacctttttggtcctcagtttctctgtgttggctgtgtgtgaaagccaaagtgaaccagtgtgtagctcagtttcagagtttgtacttcatatgtatgaggtcttgggttcaagtctccagcatgcacaaagcaaaaactgagttgctataggaatagttgatcacatactttggcagcctgtatcccagcagcctgtggctatggagtgattgttgatttttccagaatactcaataaattgctgtaagtctatggtagatctgtagagtatccatccagtatactaaaggggacaggtcatcacagttgttcgccttggaccactgtttatgcagttttggtctgagcagtaaccctgttggctctgcctatcctgctcattactctcaggtttgcctagctatcaagagctctcactttcttctgtctaggactctagacatggtctagaccatggtcccatgaaactgtcagtccacccctgatctgggaccatgttctggaagatggccttcaaagacgaaagaaattatgtcttctactgggcctgaaaggaactcggtgggaagcaccaaggtggtgggctgaggctttctctgatgttccccttctcagtgctgtctgccttttgatcttgtggctcctgttgatttcattgtggagtagagaacctggtggttaagggatatatatatctatatatctctatatatgtatatacatatatgtatatatacatacatacatacatatagatacatacacacatacatacatatatacacatacacacaaatatatatatatgtatgtatatatatatatatatatatatatatatgtatatatatgtatgtatatatatatatcatatgtaattgtccagctcagtagccatggtttgccagaacaaccagaaagtgtctccaattcagcactgtgtgttctggtgtcttcctctgtatataccttgcttctggtgtctatttctgtacctaagccacctctctctttttggcatctcttactatatataggtgtcttagtatgtgctctgttgctgtgaagagacactatgaccatgacaactcttataagagaaagcaattgattgaggcttacttacagttttagaggtctagaccattatcatcgtggcaaggagcatggcagtacacaggcagatgtggtagctgagacttctacatgtggatcccaaggcggcaggaagaaagactctagtcttggttggcatgggcttctaaaacctcaaagcccacccccagtgacacattttctctaacaacaccacaccttctaaccctttcaaatagtacccactcccaggagaccaagcatacaaatctatgaacctatgaggcgattcttattcaaaccaccacaacagcacactcctggaatgagttttcgtatcagtcacaagtctttgattgcagatatcaaataaaaaattcctaaataacgtagcatagaagcaggttgtttttatacgtgtgtggccatgatcctcggatataactttcttttgacagaatgcatgaatactcatcggaatgacttcttttgagtcaatattttgtaccaggcactgtggtaacatgcttataactcaatctttgtgacaactgtctgagatgagtacttttagtgtcattttgaaagatactgaaagcattttacttatttggatttatttttttttaaattttctgcatatgagtgcttttgcctgagtgtatatatatgtgccatttgtgtgcctggtaatggtggatgtcagaagaggccatcacacccatgaaactgaagttacagatggttgtgagccaccatgtggttgctgggaacagaacccaggtcctttggaagaacagctagtgctcctaaccacagagccatgtctctagccactggtatacttttcttttcacatgacagaactgaagtacagagaagtattggccttgggtcacacagtcggtaacatgcagagcttgagtttgagtccaggaagtttgctttcagggtctgtatgtctttgaacctatcttgaactcttgagagtccgtcctttctggctgtgtgtttgctgatatatatatattttgtctgttgttgttgttgttgttgatgatggtggtggtggtgacgatgatgacgattgtgttagtgctagggatggaacccagggtcttctcatgttaagcaagccctctgagccacatcccttgttctgtttatttttaggcactgcttatataatagattgggctatggcttccctctcaaaggctctggatattgctttcctaagcgtcagtgctctcttgacttttcacagggcagagatcctgtgtcctcttgtggcctttggattttgcgtcatatttcggtagcaatgctatgctttttttggttttgttgttgtttctgctttttgagacagggtttttatgtatagccctggctgtcttctgagctttaacgtctggttttttgtttgttttttgatcttgtaatactgtctagggtggctttgtagctgtcactggggcctggataccttggggatgcaggggaaaagtgggagggtgatggctagtgaaggcgacagagccggtatggtagtcacagggcttccagagcaggaggcacctccctgcttggcagatgggggtctgtttttttttttatcctcagcatcattatgtgcttatacttgctaacccccaggacctgggctatcccttggagcttggctatcagaacttcctctatcccagtgagcctgaccttcgagatctgcttcttttcttggctgagcgactacccagcgatgcctctgaggacgcagaccagcctgcaggtatggggtcctataggactggggaaatggactgtgttcccagggtgataggggcctgagagaagtgtcaggaagggtagggggcagggcatatcttctggagaattgggtggatcagaggtcagagaacagatggacccaagacaagcagcgtgaggactgggttcccagcttaccctgtccctcgcacactcactaactccagtcttctcacatgggtgttcttagtggtctccaaatgtaccaggtgagagctagcctcaggatattttggtccctgaattattcttccctcagttctcttcatagtcagctccctaccaggtgagtccaaagcatggggcacatgctgctaaagatggctataaacgccacccaccctggaactgtaaacgtgtttaaaatgttaggagattttttttttttggtgtgacttggttgcactgttcttgagcatgaacttcgtagatgacaacatcatgcccaagtgtcaaaaggttaaatctatcctcagtgttctgtggcttctgctctgttatgtcaaggaggtctttctctggctgttcgttgagacgttccggctcccctttaccatccttctctttcctgcttagaatagatggtgctagtggtcctattcttgaagttccttttctgttctcttgctgactcatgaagatggagacctcattttggttttcctgaggtggtctttaaccgggtaactggtactcctatgtagttaacgctcagtgagtgctgagtggctgagaatggtagttgaatccatctgcatctggaggtgagggatcaggtgttatggctggcttcccagattggtagcatgttactccttccctacccacccccctcgccccctcataggtgactcggctattttccttcgggccattgggagccaaatccgggaccagctggccctgccctgggtcccacctctccttcgaactcccaaggtgcagcgcctccaggtgggaatccccacctccgtttggacttgtcccctccttgccttctttgtctgtcatctgtttgatcaggttgttgtccctttcattagtacctcattctggaggcactgactttgctttccccacagggctcagccctccagcagccgttccactccagcaggttggttctacctgagttgaattccagcggaggtgaggatgcagctgtgtgaatctaagcgaggaggggagagccttgtgtgaacactggtatgcgaggacaaatggctgacactgtctctgccttcagagctatgggagttccaggccagtcccctgctgctaccagcccccacacaggtgccccagcttcaggggagggcagcctcactccttgaacaccatgccagccagctctgccagcatgtgaacagggattgcccaggagatgaagaccgggtgcgctgggcatcccgcgtcccatcccaggtaccgcctgagttcagctctccctgagaggctcctgtttctggcggctcctgtttgttctctgcatctcgtttccccccattctggccctctcttcattgcttctctgtgtatacctgcctggctccctgcctgaaagagtggataagaagtgcagaacctacaccaagcccttcctgcctgctcttcttttctgaaaaatgggggtgtagagtagtgaccttgcatgagttttacctgggactgttgggggcattccctgtggggacagggcctgagcctttcagtttgtctgactgtgcatttgtcagtgattctcctttgtctggctctaggtgactgcaccatctcctcctgtcactgtcttgtgctgtagttctctgatgcactctatcaacctttctgtctccctgtttgtagccttcatctttctctgtctcacttttgcctatttcttccttttctttctccgcctcagtccattccatgtctttctctgtcctcgcttcctccctatctacttctctgctggtctcttctttctaccttcttcctgtccacttccagttttgcctttctatctgtccctgccgccctgattgccatttgcttattctttctccctccctgcccagtctgcttttttggggggtgggggtgggagtgggggtgggggatgagatttgagacagcgtctcactagataacccaagctggcatcaaaatgtataatgcccttgcttctgcctcctgagcgccgagactaaaagcatgtgccaccacacccagctcccgtctcttctttacacttacaggaagtttgatgtgtaaatatagaggaatcgctctaatgatacttgtcttctagcccttcttttattctcctttagcttccccactgtggttttagagaaaatctcagagcttggactacagtttcatggtagaacctggtttcgtgttcaggatcaaatcctagcgaacccaaactgtcacataatttcagctctgagtactcagatgtgtcattactcacaggaacatttttgttaatggaaccactgtactgtttttatactgaatgaaatgaatgatttcttagcaccatttaatactgacacagtctctattgttaactctaatttctttatcttcctgtccccaactctagattttttttggcctggtactttttttttcctgtgtctatgctgtccatatctttctgtctctttctaatttgaaagctccaggctcagtttcctctctagtcactttcttccccagggtcaggggtgactgggtagagaagtgcagctgtggagagagggcactcctaggccagggctgggacctacagtggtgggaagttccagccctagggaccagcaggtatgccttcctcttgccctctgtcctttccaggaggattcccgggctccacagcagagactgcacaagcagctgattgaacatctgcgtcaaagctggggcccacttggagccccgacacaagtccgagacctaggagagatgctgcagacctggggtgctagggctatgactggtgtgcccaaaggctcccgcttcacccattcagagaagtttaccttccatctggtgggtaggctagagtggacagggcgtgtccggattgctttctttataaataccactgttactgacagaggatctggtgcccactgagtaggtcctctccaactaggacagggtgtctagatggctcccctagcttcttgagactttagtggaggaaaggcagataggtgggacttgtgtaagagtgtgaagtgctcctagtacaaagtccatctttccttgggctttcctttggaaattttttccctttggaaacatcttttctccttagacactcatctttcttgtggacattttgggcaaggtcgttatggagtcagagtagttatagggtcagggtggacatagggtccgggtggtcaggtgattatagggtcatggcggttgtaaggtcagggtggtcagggtgggtatagaatcatgaagaggttgtagggtcagggtggatatagggtccagatggtcaggtggttatagtgtcatggtagttgtagagtcaggatggtcagggtgggtatagaatcatgaggttatagggtcggggttgtcagggaggtttccttgtggtcaggcactctaatcagcagttacagatggcactttattctcttgtagtaacaatctgaaaactgtcagtggttgagtggacatgggtacagtgcttgagggtgctttgggggtttgaggctggcctgggagggatagaactttgtgtgatagtcaggttgctttttctacccataggagccccaggtccaggcagctcaggtggcagatgtaccagctacctctcaaaggcttgaacaggtaaggagaccaagacagacagacagacagacagacagacacacacatagagtcagctgggctattgcctgtcttctggacttggtagctccacctagactggcgtgtgtttctcaggacacacgggcagctcaagagcaggagttagagtcccttcgtgagcagctggcgagtgtgaaccacaacattgaagaggttgaagctgacatgaagaccctgggaatcaaccttgtgcaggtgaggggcttagagagggacttgggctggaccaggtcagaactggggccttgagagatgatctgacatctagagatctatagatgccataatcgtttatggagcatcctagagacctttggtattgttgaaggctaaggagaacttatgcaaagaaacatgtagggttgatggcttgctagactataggtctatatagactatataggcctataggtctggcatcagtcaggctttgtaggggaacataggagctatgggcatcaggggatcaaggaggatgtgtaggggcagggccttacagggcttctcagagcctctggctgtcagtacagagctgaagatgccaaagcctgtagtaggtaggggccttggagttctctgaggtcttgagctgggccagggccataatgggctcactgggatcgtgggctgtgtgtatgactgggagcttggctgtgagtgtaccaggtggaaaccgagtgccgacaaagtgaactcagtgtggccgagcaggagcaggccctgcgcctgaagagcaggacggtggaattgctgcctgatggggctgccaacctcgccaaactgcaggtgggctggggtttggggttgggctgagaggggtgggtagatggatccagcccatcttgacatatccttgactcctgccagcttgtggtggagagcagcgctcagaggctcatccatctagcaagccagtgggagaaacaccgggtcccacttcttgctgagtaccgccacctcagaagactccaggactgtagggaggtaagtggcacagtgggctgagtgtagatggactgccctgatagatagggagggggctgagggagggggctgtttctgagctctgctcactgccttctgcctatgggttcctgctagctggaatcgtctcgacggctggcagaaatccaggagctgcaccacagtgttcgagcagctgcagaggaggctcgccggaaggaggaggtctataagcagctggtaaggcctactttagggccctgggttgtaagggtggttgtggtatagggcttgggctcacgcctgccatgttcccacctaggtgtcagagctggagactctgccaaaagatgtgtcccggctggcctatactcagcgcatcctggagattgtgggcaacatccggaagcagaaggaagagatcactaaggtatgatgtcactgtggctctgattgatggctcatgtaggcagacaagcataggggtgatcacacagggactttatgctcactactaggcagagctgttcaggcacactccaacacataatagtcaccccaacacagcgacatgggccctgactggatgtaagtataggcacgtgagtgttatcactgatcagctaccttgcccaagatgtgcactgatagttaccctggtttctaccagatcttgtcggacacaaaggaactgcagaaggaaatcaactctctctctgggaagctcgaccggacatttgcagtgactgatgagcttgtgttcaaggtatggagcaggctggcctccgggagggtggaggcgggactgagttgttgcctgcccctctgtgagtcctttaggtgcactgttgcttggggcctagctttgctctgtggaggatgaaggcaaagtactagtaaagggtggtcttataggggcatagagtagtggaaaagggggaatggcttgctgatatctcggagatcccctttgtcttatcaggatgctaagaaggatgatgctgttcggaaagcctacaagtacctagctgccctgcatgaggtgaggggagccatgtgcctggtgggttggctggagagggccagcataggtgcaagccttgtattcttgctgtctccagaattgcagtcagctcatccagaccattgaggacacaggcactatcatgagggaagttcgagatcttgaggagcaggtgagacctgggactggtaaggggaatggagacaggccaggggatagttccttgttttgcgctgagagtctttgaaaccagacaactaacagctagaggctttgccttcgtgcccactgtgcctgggacctgaagctagccagtagcctactctgagccctggcttttagcttgcggctcctaatgcctcccagagcccatggcagaagttgctgctttaggtggagtggagggaaggacatacccagaagcccagtgatgggaaggaacaggctgctgttacgggaataggaggagcagggaggagttcagtagaggggcagcctgcaggggctgaagaagtgtgcatcctgttttcttagattgagacagagatgggcaagaagactttgagcaacctggagaagatctgtgaggactaccgagcccttcgccaggagaatgctggcctcttgggccgggtccgagaggcctagagccctgatggatgtctcctaaccacaggcaggaatttggggtgctggagacagtgctgaggcacctgttctagcactctctttcatttggtatccgctttctcctgctgggatcttaaacccagctgtctgcttatatgttcccatatctgatcagggtgattgtccagctgaccacagtttattggatgggcactgggggccaggggccttggatcccaaataaaagagaagttcttctgtgggccacgcttaggcatggattggggcttgtgggtagggaactggggtcagtggcaagtgagacgtggggtacatcttggagagtcggtgtgtattcatggaactcaggagatagagtggaggggctgcatgtgtgtacgtgcacacgagcgtgttctgacaagctgtgtctgacttgtattttgggcattgcttgaggctgcgtatgatcagttatgcctgtgtggtttggggggatgtaattgtgaaggttccagtgctgttgctgtgtaagggtctgtatatacacctatgtgtgatagtgcccgtggttccagatgttgtgggtgagtgctttggggtgtgagtcagtaggactgcagtcatgtgtgactgcatgactaactttgaaagttcacgaatgtaccaaggcaggctcttcatgttttagggtttgggttgagtaaatattaggatggtgtctgtcatctttctgcttggcagtggccaaggcagatatgtatagctggttgtgagggctctttgactggaaagttcatcttggggctaggttggaactaggggctaggctgggattggcacccctctcagctgtaaggcagatgatatgatctaggagggcagctagatagggagcagaggccctgatagcaggcacatcatcgcccggtttccataggtacacgtaggacttgcctccttgcccccacagcctcagtctcatggttttggccccctcccccgcccaccttttcttggttttgaggtcaagggcagggattggagcacttgttggggcgttggctcctcttcttgcgaaactcaaattcatctacggtccacactgctcccttctcgctctccactcgcacaaagcacttgtgcaggctcaggttgtggcggatggcattctgtggaagggggaccgggaccccagtcagggacagggttgacagtcatcctgagtctgagactgacctgctccttccccacatgtctagccccaggctaaccatccttggagccatcccagctgccagtgtgtacagaggaactcaccttccaggtggcggggtggtttctgaagtaggcgaacatgcgagtaaaccaatggtagatttcattgagtgtcctctgcctctccggggcttccaggatggcctggaagttggagtcaggtggaataaggggcatgttcctcagggttgtggctgagggagcagcctactctcggccctctgagctatgatagctttgtaattgtgggtcaaggggaaggagaaagaatagggtgaggcatgaggtcaagggtgatgttagagatagggtggacaaaggaaagggtagtttgtagtgttacagtttgctttgcactgacctggcttgcagtagttttgggttgagggctagatctgaggtgaagctatcaagaaggatcacatcttggggctcctcagagctgaggtttgttaatgggtgaattctgctcttggtgcaatgtaggaggcaagcactccccaccacaactccccccctgccgcccaccagctgctgggcctctattgccctgcttacccatcggataagggtggcataggtgaaagggggtcgcatattgtggtacttgaagtagtccatgttgtggaagaactctgcagaaggttggcatagatcagagcctttggcctcctcaccccctaccccacctttgtctgcatcaggaatccaaggtctcaattcctaccactagcaccaaggggggagggacagtctatgctcacacatagtactgtttactgagtacccgccgtaagctgtgtcttctttgcagtactcctgccaaatagctctcctcactttaaaaaggagtcaagtaatttgtacatcaaaggcatgtaagcagctcaagtggcatagccagcctgacaccaaatatctatggtccctggtaaactcacaacccaggcctgacaggtgggagagggttggttagcttggttgagtgcacctgacttcctggaggtggggacggaagagagggctctttggactcacttggccaggctcctccctcatggtgactgaatgaagtagcagatgccaaataggtcaggcctggctccaatcccccaaaacacggggcccaaggctatgcatttataacagttgagggcttctaagcctaataaactcaggtgcagtttcctcccagctcttagtgggggtgaggggggtgggggagctcctttgtaccccctggcactggggtgtggactccactgacctgggaaggaactattgccatggcttccccagaggtgcctccgcactgcaaacaggccgccgtctggagcctcccgaggagcagaccaggccgggagcacactgccctgagtactggtggctacgatgcagcaagagctcttgtccattgaggcctgaggggttgggaggggtgtggtaatcgagacacttaagcttgtcatttcattgtagcctttcaaacattagtttgtattttcttattagttaaacttgtttttagacaattttgtacatgtatgtaatacatacagaccactttcaccctatctcctccctcatcgcttatcttccttcttctcattcctttcccccttcatccatgtctatttattttggtcttaaaattattattgccattattattattattgacagggtcttactatgtagccctgactggcctgcagctctcagagatgcacttcctctgcctcctgagtgtttgcctattcattttcgttttgtctgagacagtctcactatatatctctagttggccttgcaccttctagcctagttctacctctggagtgctaggattataagtgtgtgccaccacatctggcttccactttttattttatgtatatatatatatatatatatatatattttttttttcttccagacagggtttctctgtgtagtcttggctgtcctggagctcagtgtatagaccaggctctgtagaccagactggcttcgaactcacagagatctgcctgcatctgcctcccgagttctaggattaaaggcgtgcgtgcgccaccacactgagtcttccattttactttaaaaaatgattgcttgcttggttggatatttatgtaggtgggctcttgctctgtagtacaggctagtctaacatgtactatgtagcatgtagtacaggctagtctaacatgtactatgtagcatgtagtacaggctagtctaacatgtactatgtagcacaggatgggctgagattactgccaagtcagcttgcattttattttaggtatacgggagttttgcctgcatgcatgtctgggcatcgcatgtgtgcctggtacctgtggaaggcagaaaagtgcattggatccactggaactggagttagagatagctgtgagcggctctgagggtgctgggaaccaaactctggtcccctgaaagagcagcaagctctcttaatccctgagctatctgtccagttccccaaccccactttattttacaatttgcatttcctgatttggtcatatttctatctgatttgtatgtgtggtgtgtgtacacatgctgggattacagatttacagtgctgcatctggtgtgggtgctggcatctaaactcaggtcctttttctgtcagaggtgttcaagacagggtttctccgtgtagctctggctgttctggaactagctttatagaccaggctggcttccaactcacagagatccacctgcctctgcctcccaagtgctgggatcaaaggcatgcgccgccgccaccaccacccagcaaaactcaggtccttatccttgtatggcaatcacttttccctctcaagtttctccccaaccgtgtttctttgtgttttagaagagtcagggtgtctctgtgttgaccaggctggttttgaacttgagggttcaagtgctcctccttcagcctctccagtagccaggactacaggtgcatgccactgtgtccagtaaggtcaatgcttttgagaagggcaccaccctatagtcaattgcaggctctggtggagctctgtaaagcagcatcttagagtacaggcatgagcatgcgatgaagccatagatgctagggctggggtgagcaggggcagaattggaatcccctagcaccaactgtgaacctgggagcatcaactaaatcttcctgacctaagttgtcctcatttgtgcattaggatgatggtggtagctacctctgttatagtataagactcatatcagcctgagactgggtatgtgaaatgtgtggtcacacactgttcgatgttctgagcttatcttgaaatttgaacataaggccctccattttccttttttgcagtggccctgtgagttcactgccttctgtatgtgccctgaaaaggcagaatcataatgttttggaggtcagaaggtttgtaagcagagtaggcgtgtctttggatctggcatattaattaggtgggaatggtctgtacagggcagggcttgcatgtgagaagaagacatttggtccttatgggctcctgtcttgcccctcagcagttgaagtctgctgcctctggacttggggtactcaccacagatggagccttggccagcgccatcttcccagccaggtgggcctgcatagctcccagcttctccttttccagctccagctgtggggatgtacaccaaagtggggcttccacctggtcgttctcaggcacacttttgcccatgccttccctcacagggtcctccctcccatccttctttcccgcagccacaccccgcagccacaccctgcaggcattacctgctgctccagagactgcaccacttctctctggaggaggcactgggccttgcctttctcatccaggagatgatctgcttggcagtgcctgagtaaggagaagattccatgtagctgaccatggtgggtcaggcctcttggcttagtgtatcagttagggacggcctagaccctttgggagatttctctatgctcagtgctcccccccccacccccttgcttgccttaaacacatgtgcttcagcaactctgggctgccaggcctgagcttatttaccctttgagtctggccaaaatgctgggatgacgttagacaggaggtatgcaggggtatggcatttcaggtgtcaggcacagcccatgcaaaggcctggccacgcaaacacgcaccattgccaaaagttaggggtgactagcaagatacagaaggggagggacagcagatagagagcagagaggcaagagctctatagtcatctagaggaacagaaattggaggatcaggaatgtgttttgtgtgaggggaagcgggacaaagcagttaggcgtgtgggctctggaacctggctgcctgtgttcatattcaagattcatcacttaggtcctgtgtgagcttgattgacccttaattctctgtggccttagatccttctgcgtgtaacaggaaggtaactatgagcacatacctttattattatgtctcttcatacatgcgaggtaaactgggcctagagacccataacttgcccaagatcacagagccagggagggatggagtctgaatctttatgattcttattatcatccattgagaggatggtgagttgagacgtgaagcctagacagcagaactctgtgggtagggtcaggctactcacttgagaaactcttctggctcctcgaagaccttctcacaaccaggccacttgcagactccatttgccagcagtgggtaggatccttggggtgcagccaaaaggttgctggggatgggagaatatgggatgtcagcagaggaataggtgcaggggtggggtgaggtgtgggcaggggccgtttcttgccagccctgccaactcacctgtctttcctgggtgtacccgagcgtgggaaggtgcagagtagagctggctccctggacacccattccagactggccacattgatccctgtgggtagagacagggtacttctggagctgcaggttagactctacagcttgttccagaaggcccctccccttcctgagccttgaagactctgtctcatagtactctgctgttcccacagtcaagggcttctgacataacagcctaaagatgcccattggtaagtgatggcattttgactgataatagcgatttgtggttttttttgcattctatgtcttcaaggttctaagtctgatatttttttttttggaggttggagtttccgtgactcttaagacccttctatacctccatagggctataattcagaaaagtttacattgcacatgctcaaagattagagaacttggagatactgtgaaggtgttaccaggtggcaggccaggccgggccttgagggagaagaccccagtggcagcagaaggtggtgggaggctgatcatggctgggttgtccagtggacgcacttggagcacaggggtctgggcatgggcatccacagtggagagctggggaacacatggaccatggctcagcggggcttggggctctgctccacagctgtcctctttgttccctcctcccagcctgctccgattccatacctgatgcatgaagtgtggtctgtcctggagaagggcctgtaggtggggtgagggacctagtcgggccccagacggtgccaccatgactaggggcactgtaggcagctggagagagaagggagatgccatgagatgccatgagcctcatcttaatagttctgtgtctcattcattagctctttactaaagtctcacacggtagcaacaatggaactatccagttcacatcagtggaatctgaggctcgtggagagtgaatgtatcaaggtccaacagtttcaaggggtagagctggccccaacactgttaccttcttgggccccagccatctcgtcacagtgggatgaggatacatggctatgtccatggaatcataaggtctcctatcgggatgaggattgggaggggtggggaaagccttgaatctctgaagcctggagagtggggattttcttggccctgcaatatctgcataagtcagacttgcctgggacccataaaccacttcctgtgccccagcccccccccccccccccgccacatgccacagtaaaggtcgacacctataggcccaagtaccccaccctgcttaccccattctgggccccgggcctcacctgcagctgggatggtggcagggggttcaaggaagaagaggtgtgggccccacttcgcaggtcccgaccttggaagggtcccccagagcccctggtccctagaagttctgagcccttgggtgcagtcttccagcttggcaagactcctggggatgggccaagggccaaggaaggagccataggcttggctggcctagggttgggcattgggttcttgtcagaggcaggctgcagggataacagtggaatggagtcacatgcattccaggggtggtgcaagatagcctcataactacacctctggtctgtcttacatacatatatgctaccctgacagcaggaacacagattgatggatatattctacacatgcacatgtccagcacctcacttgcttacatacaccataccactctgtcgtgaatgtggggtgatggggagttggtttgtgggaccctccagtaccccctgcactctgtgcaggccacatagtctttgctgattctactggggcttgtcttggactctcttctcatctttttattccaatgacttgggcatagcctcacaagattcagttggatgctgtgagcaggaaggctccagggaactgtgctagtgggaagtgtactgcaatagtgaggcgagtggtgttgctgctaccaacctggataacggcagaggagctgctgagatgtgactgtcttccaagtctcgtctgaaggcagagtcaggagaagttgccgggagcttggatggaggagatgagagaaagggtcaagatgatgtctaggtttttggcagaagcagctacaacaggagcattactggagatggagggtagaggatggaggagcagagtatacagtgatagtcagatgtggctaaatgcaaaggtaagcagtagaggcagggaagacttgcagctgaattcagtactgcagagctcagggccacagcatgggtctgtcttctctaagctttcttctgtcttggaattggcgtggcaggtgccaggaaaaaaagagggatagggttgcttgattgagggtccctgggcgctcctcaaactagctccaatctctgccaagcttggaagtccacttcttcccttagccatactgcagtcttctgatttcctcttcaaagctctacatggtgacccaggtccctgtgctgagcctcactaccttacagtcccttaaaagtgtggctttcgtttttcaggatcctatacttccagtcagagagggaaccagatcttgaactgactatagaattctaccctgattttaattaagaggatagccaggttcagaattctatagtcttctcatggcctgggacctccttttctttttagatagggtttcttgtagtctggaactccttatatacccaggctgtccttgaactccttgtttctgcattctgagtactgggattataaaccaccatttcaggctgatactgcctcatttttctctaggaagtatatatatgtacattttccctgctgtgtttgtgtgtgcatgtgaatatgtcattctccgttctactatatactacatgtgttgggcatgtagcttctgagaacagcctgggggaagcacggaagggttttggaaggcaattgcatcttctttgctatcatgtctggggcttatcagagttgagagatttatatgagaacctaggtattaagactagtgtgtcacgggctaaaacattagcatgaaaagaggagtctgggtctgtggaagctgagactggcttcctagaaccgtgatgcgatgagctgaaagactgcaggcaggcagccatgaggtgatgctcctccaagaaagaacagcaaaggaaagcatcagagatgagaaggaggccaggacttacaggaggaatcaaccctgctgacgtcttcatcttggtcttatagcctccagaacgctaacatgataattctatgctatgtaagtcccccagtttgtgatacttcattacagtagctcaagcaaatgcggatcaggtttggtgagtagaattttccactatattggcttaacccatatggctggaccatggtcacttttgaagtgctctttatgtttggtcagaacttataagaaatctcctccttaaatacttgtggaactggtgtgactgtgtgatgcatcagtacattctcagaaagaggacctgaattggatatggtctgtctagtggtactagggacctggagggctgggctggccagccagcttcctgcactgtctgttggggcgttcctgtttgactgtttcttagaagctgtatggaggttgtttctgggacatagaatatgttttcctatcggggtctacatctgggccctgttgtcacaacctgaacttggccagatttttctgccattgacgtcatggcggccggatgcattgggcttcatcggcaacaaggaggaagagaagggggcagataatctaccccacaggtttcgttccgagaagtggctagtctatcctgtagccggataggcccaggtagggtgatgtgggtgctagcggatgtggtaggtgacgtccatctggctaccatgcaaaacccaagttctatcgattctgtctttcttggatgccagaggggcccaaggttggatgcttggtgagtattaggcaggcctcatggatattgagacccccttgagtcttcaaatgctgtagtaacagaaactcagaactgtacgatatcatttctcaaagccaacggattttagaatctcaagaacacagactctgtagggtgcatggatccaccttcttactgtgtgtattgatgtcccagagcccaaagaaatgggaaccacctaaagccaggaagcttaaaactccataaggcctcttgctggctctggaatgtcagcctccctccctcctgagctccattatgacagaggattggaaaaccctctactgtcctgatctggggtcaggctttgccctcttgggacaaaggggccttcctgtccatctctgagcccagtttgcccttctagactgggaagagtatgtgatggaggaaggctggggtctttctgtcctcctgtctaatttgggacagtaacaggagccatcttgcaaagttcgtacatacagaatgctgagcaagtgtctatgactgataaatggtcacttacatatggctccagacccgctctcctgggacaactttccccaaattataacattcttccagatacagggacaagaggaagaagacatttggcctggccctcatggaaagagcacaccaccaggctttttggaagggccccagaatggttgtcccaaggaatgcagtatgaactctgagggttcatacttaactgatatttctccatcgttactagtgttctttggtccgctaggacttctgactcatggggcccagaacctcacatagaccagagcttgtgagatttggccccatgctatggttatggactggatccaactcatgaggatgtagaagagggaagggcacctcaggtctcctgttaatggcctcctgggtcctgagaggtaaactaaggcctgcaatgtggaattgccaaagtcaaggtcccactgagaattctgagatctgctcttggatttaactctgacacaacatctctgtgaggcctgggggtgggggctgctcatctctgagcccagtttgcccttctagactggggagggaagagtacgaggtggaggaaggccagcatctttctgtctcgtggctggggtaaatcttatggagctatatagccgtatgtatgtatggtatggtatgagatatatatattgatatatatatatatatatatatatatatatatatatatatatatatatatattgagatatatatatatatatcatatgtgtgtgaatacagatatagaagagatacagatagagaaatatatagagagaaacatgagatggaataggaatcaagctcatagagagagacagtgagagcagtttagaggaaaagtgacagagaaagaatgaacaagacagagacatatacagacagacagacatgcagagacagagagagagggagtgagagaaaggactgaaaataatcactggcctctggctggaggactgatgctgctaggtgccagagacacccatggctggtattgaattgttttgcaaagcaacatcagaaaaatagtgtgggctttgtacaagaataaacactaaggagcagattagagtagaaaaccgtggcagagacccatgcacagagggaatggaatttgtgatgaacacaacatttcaacatgaggaacagtgcaggacagattaacaaatgattctgagacaattaggggaaaataaagtgactgggtagatagcccactttcccaccaatacctccctgcccacttgaaatgtcgctgtcatcagacgctctagaataatttccagacccactagagagatacgttttaatgtctatcattgttgtttggccttgtgctgagcacctaccatcattaataaaaataatcctcagaaagatcctctgaggtaggtactgttataatcatcacagtacatacgaggaaatggaggtacagagaggttaagagcctgggtaaaattcacacagatgacttgagttgaggctaggttgttccagacagtctggctcccatacccacacttttgacctctgcagtaaatggaaaaaatgaagccataaaggagactggaagccaacatggggtgaacagttatctcattttcaagtgcaaaagacttaaaacacaaaaccatacacagaagccccacaagaaaagagtaatctaaagacctaaaagacacatgcattacaaagcacaataaatagggaaaaaaagcaagtgattgcccgccgtggtggtgtatgtcttctatcccacttctcagaaggcagaggcagatggatgggtctttgtgagtttgaggtcagcctggtctatacagtgagttttaggccagtcagggctatagagtgagaccttgtctcagaagaccccccccccccatacaaatagggctggagagatggctccatgggtaagagcactgctgctcttgtagaggaggtagcttctcattttcaagtggtaaaaggcttttaaacacaaaaccatagaaagaagccacataagcgccagcacccacgtaaccatctgtaactccagtcccatgagatcccacaccatcttctggcctctgtgggcaccaggcacacatatggtgcacatgcaggaagaacatgcatgctcataaactaagtaaatgaatacaattaaaatacacatacacacaaatgatgaatttcagggaaatatgtgtcatatacatatagccaatagttattatcctttctaaattaagagctattagcaattttgaaaaatcatgagcaatttagtaggatgaagaatgtgatcataaaactctagcctacagagcacaaatggtcagtggtcattaaaagtaaccaaaatgcaaaattttaatacttgtcatttttcttatgatggggaaggattaaaaatggtaacacacacctaaaattaacttgaatagaaacaacagaaaataagacaacgttttggaaaagcaatttgtagagagggcaaaaccccttaagatgtacaccccttcttccccagctactccattttcaggatccatggagtcaggtatggagttttagaatcagaagaaacccaaatatcccaccatcagcacttaattcaggtaatcaaattcatggtgatgtgaggacagtcacggcagacataaaagatcacgtgttcgttattttagtatgctacaaaaatggtatcgcttgaacagagcagaaacaaatccaatctatagcacgattctaatttgtttaaaaatgctaatagcaaacagtgagaactcaccatataccaggcacagtgccacagcactaaacctgcagagaccagctcaccctcgtcctgaactgcctgctctccttgcacatggattctgctcacagtcatatagtcctttgctaaactgtggctgactgagggtgttatcttgcgtgacacaagcagaaggtcagttaaatgctaagactgacctgacagctcacaaacctaagacacacagaactaatgcccgttcttggaaaacagagctcttaagccattattattaagcgccagttgtgtacaaatatctgcgctcaataccgggtgcaaaagcagctgaaggaagatgagccgagagtcagagagcgggaggaaagaaagggactgtggctggccaggctggaagagacagacaggcatatagtcagagcctgggaaagagacagagactgggcactgatggaaggcagagacaggcaaagaagcagggggagacaggagaagaaatggaagacagcaggaggaaaagaaacaagagatgcacttctagtttctagttatagctggacagcatcttgagttgcctaaagctccggcattcctggagaccagcagttgatagacatatgttaaaaaaaaatcctgtttatctgtgcatcaaacaatcaaagtacttctttttgcccctgtctaaggaccaactgctccacctatctggcatttaggatgaatggtattagtttccaaagtccttacctggagtggctgggtgtttccagctgtactggtgggctcctgacacccaccctcaatacctctctgccactttcgccagcagagctgtgtctggtgggggagagcagggacactcgctcaccttggtgaagtggactgctagagggggatcagcctggcttgtgggaaactgccacattatcaaaaacaactttgcttttataccgagaagaaaaaccacggcgtggaagccgcagacctcgctcttctaataatccaatttttttttgatgagtgtgtgtgctgataattgcagggtggggggggggttcttgtagtttttttttctttgctctcttactttgtttattcttttcttatgagacttaaacggaaattttgaaattttgggttttttctttgccctttacaagtcatctgaaaatatgatttcttcccctcaccacagaggtaaaaggtatcaatgagataacagggctcatgagaaaccacaatttcttaaacaaaagtgtgtagagtcagaaaaaaaaaactgagggaaaataagtcaaatcacaaaggcatcccgaggcaggtagagacagcattgtgtttgtgagacgttggaggatcgctgggttgaacagaagaagggatctgaagcctgccatgtgaatgggaagcagccaggggagaggtggggtagtgctctgtctccagaggcttccttctgctccaaacctcagtatttccttagcaagcatgcatatgatcaccaccatcatgttgccaaggcttggcagagctggccactcctgtagcctttctttccacagaaggcaagaggcatggaaagcaattcatggagaaaaaagtgggctgtactccccccacaaattcacagaatcagagagtctcagaatggctggctcccagaagctgctgcgagtctctgagtgagccccacatcatgtttgtgctgagtgccctgacccagcagccacccacctgggaacagccccagtggctgttaatgcagccagcatcaccaagaagggcaaggggaagaaaggctggccattgcagctcagtgccagagtgcttgtttaacacgcacaaggctctgggttgttaaaacaaacaaacaaaaaaaccatacacatagcggcccagggtcctagtcctgtcaggaacaatatagccatagcctgatgattctaaactttgtaacagtctactctgaaaagttccagtttcatccagtatcacataccagtaatcccagcaccccagaaactgaggcagaagaatcaagagtttaaggttgcttggggctatatagccagattccgtgtaaaaagaaaaagaaaaaaacaaaaaacacaaaaaaacaaaaacaaaaaaccaaaaccacaaacaaaaggaaagaaacactcccgtttgcaaaggtttaggattctaaacagctgtcataattttggtagccaacatttaactagaattttctacattccagacagagccaaacacttctcaccctctgaggtccatctcatcatggctgtattgtttttagaccgatgggcaaaatggaggtgcagcttgcttaagatcacaattttgggaaataggggtccttagcattgggctctgaagtgaccagttttcctgaagccaacagtgtcatagaagttctaggacttggagactcctctggaacttgatgtttgtgaggttttaaggtttgtattcaagatctggcagctgcgtgtcctcgatttggcacagaccggctccctgtaaccactgtttactacagacgagcctccacagagtttttcctgacaaggcacggctaaggcttccagcctttggtgccctggcatcctgcagagagctaagagttccaggtatccaactgcatggccaccaccacctctttgcaagactggcttcaggcctgaggaagagaaagtagaaatacgtttttattcacatgatgctaacctagtaaacaattcccacactcctttgctctttccctcatttgcactttttgtccctttcggctatcttctgagcacctccccccgccccaacaacaacaacaaaaaagagactgactttcctcatcttaactcacctttttggaaataacaagactggaactgatggcttggctttataaagacaagaggggaaaacaaagtgaatagaaaaaaaaaagacccaaaaataccagccaacaacaacaacaattaaaaaaaaaaaaccctcaacccttcctatcattagttcaaagcaaaactttcactggttggggcttctaagttggtgggacacatctaagaccaaacatggcctgtgtggtgcctggaagccgggggaggtcctgagttgagagggagggaggggcagaggtgggatgaggtcctcttactttggaggtctgcatggatcttaggagcttaacagttgtggttgtgtgtgggagggaataggggaggggtgaagagcatacctaacaggtaatgggcagctgactgtagctatgccccaaagttaatggtccctgctccctgtacacttgggcccaactagtccctgtatcttctatgtctctgagacagttctagtcccctgccctgtcacctgtctctttttggaataggtactcattttctcagggtccatggtttggtctgcatcttcctttatatcctcgtcaccatcttcctgccattctgcgaaaacttggtcagagaggtggcaggataagtaaatgaggggtaagtgacacaggtttccaggaggctatttgaatggggctgtgggtgcgggagtgttaaggttactgaagtgtaaagctagggtctttgcagcatggtggctagggttttgcttgtcagagggtggtatttcctctccaccattactatattggctcatgtaggttcctggggaagcaaactgggagggctaggagttgatggtgaatggggcaggatttaacaggtcagggggagcattcccagggaaagggatctttgacaaagagcaggcatagatgaagaagagagtgatggggagatctgcagatccaggagagaagggtcagtgtgggtgtcctgaggtgagtgtgctggatatgtacagggtcagcaaggagtcttgtgtggttggagtgacatgactggaagggagagaacaggaggaaggtcagacggggctagctggcttgtgcgcttacgacatggtgaaggttggctcttcctcttagtgtagaggaagccagagggtgttgggagcagaggagagacattgctgttaggacttaagaggatgtcttagatggctgaatatggaatagggggtagaacatgggatggagaccaaccagggggaggtgactacagtagtccaggggactgggactggtgctggtcctgttgatggagtggtagtgaaaaggtggatttgggatttaaaaaaaatgatgctagagatggggcccatgcactttctaggaagtggtttttaccgctgagctacacttaaccctttttattttttagacaaggtcacacttgtagcctaggcttggaattccgtgattctcctgcctcagccccttgagtgctgggattacaggcatacatcaccatatcctgcttggaaaatgcgttgggtagataacctgcaggatttgctgaagaatgagactctgaggcaagaccggggcacagttgatacccaaaatgggcagataggatggagtcctgagagcacttgctgccttgaactttcagatgagaaaaaaaagttctaccttcattatgccattattcttctgctacttgtagctggacatattcctttcatgaccctggacacagacaggaggagcagagagactgtgggggccttcctgttaggggtcttatgagggttagataaaagcactccctgaacctggcatatggcaaacactaagtcttactaagttagtaaatgggagtgggggatatgtgaatgaacacgatggcaaagtccaggtcattcccataggaggtgccatctcagagggagaatggaaagaattcactagatgaaagaaacagatgggacagcactctaagcagaggagattgggaaagtgggggggggggagaagaaagccactgtggggtgcaaagtgtcaaaatgagcaagaagggcaggactctgatttgaatgtacattagctgataagcttgtgatgacatactatcagtcaatgtgtgctaagtgtgagttggaaaaagctaattcttccaaaaaggttctatttcctattttgcgattgattcatgcaatagtgccaagtcctgaagaacatcaatgctcaactggggactttaaggaacagttaagaacgttcatggctagttgcattggtcacaataaggctgggaggtgtgtgtggtggtgtggggccagcaggacacacccagtaactgatagaactgttttgctttggtctcacaatccggtgcagtctgggcttttaggggctctgggtattcgtggagccatggggagtcatggaagattagggaaaggtaaagccattccccagaggtccgatcttactggttgaatgaattctgattctgcgctcaatcactcaatagctcaggctcagcctatgcaccttcttccaactcagcctatttattggctactcatgctttccttcacagcacctacactaccatccgtgggtatgagttcccatcttgcctccaaagtttccttctggctacatttctctagtttcagctttggttaatcccatactggcactgtcctttgagatataacagccttcaccctggatccccatttctttctcgctcccaccttcactcctcacatgccttagtgctcccccccccccccgcccgctacagccccgcctccatgtctgctcacacacagccttcccgtctctgttcagtctctgtattggctagatctaccttgttaccacctcttgaagccatagtgtgcgctcactagactcctccattggctcattgcaactattatcgtcattctgtctctacatcattcgcgtgcagttctccattggctgttcattttatctgtcttacgtctcaccgcctacgcaacctgcggatctcccagtttttggacctctgggttcgctccccgttgcccccattgcttgtagccatttcatcttcccgccgcctaccatgcccttcgtgctcagactttcccactaattgtcatactcctgctgctacatcttcgggcccgcattaaccctactcaggcctctccattgattccgttatcatcccgccttccatcccgcccacgcgcgggcgtcctcattggttgctagcttctcctgcttgtcaatcacctgtacgtcactcccgcgtggctgtccattggctgttggccgtacctgtctctagctcaccgcctacgctccactggagccccacccccctgttctggctttctcattggctgcccgccttttcaggccctgcccccgccggtcccaccgccggtgccgtcggtgccgccgccgccgccgccgatatggcgcgcacggcccctgtggagccaccgctgcggcatcccgcgcccccgtcgccggctgcgggagagccccgcgcctcggctgaggcggcggtggccccgcggagggtgctgttcgctgacgaggccctggggctgcctctggcgcagctacgccgctaccggccgtggggcgggcccggggcgggcaagatggcggcggcgaccgggcaagatggcggcggtggcggggctgatgaggaagacgatggcgaggatggggatgaaggggaggaggaagaggaggcttttcccgatccctctccgccgtgccccgttcccgctggcggggggttttacctggtgcccacattttcgttgccgcccgcgctgggccgtctggagcggttggggcgcgtgatggtggagttggaggcgctgctgccgcctcctggagcggttcccgggggttccggggtgtgggtgcctgggggacgcccgccagtggtgcgcgggttggtgcgcgtgctgaaccgctccttcgagaaggcggtgcacgtgcgggcctcacacgacggttgggctaccttctgcgaccacccagcccgctatgtcccacgcagcccgcctggggcaggagtgggaggaacaggagcaggagatcccctcctggatcccgggctaggcctgggccctggccagatgtcagcctcctcacccgacgacggtggctgcactgaccgctttgccttccagctgccctttgctgagggcgcgagcgatggggcgcgcctcgacttcgtggtgcgctatgagacccccgagggcactttctgggccaacaaccatggccgcaactacactgtcctgctccggatcgcacccgctcccacacccactgatgccgaagggctgccccagcagcagcagctgcagcagctggagccacagcctgagtgccagggtcctgtggaggctgaggccaggcagctgaagagctgcatgaagccggtgaggcgcaggtaatgtctgccagcgccacctccaccaacacagggctggatgtagaagcctcccatcccagcacttccccctcccccaggcctgctctccaggacaggcaggagggtgcattcggtcaaagagtagtgcaggccaaacatgtgctaggcactgttttaaattctggggtatcatccatttattgagttccactataaggccctgaacaagacagacaccttccctgtccccaaccatcccgcaaaggctcctctgggaaacagaatgcaaaagcaaacaagcagataagataaatagggctaaggttagtgctgagaggaaaatactgtaaggctctggagggagtggctgctgcagacgtgttgagggtgagctcttgtgaagagtcccagacggtgataacgaagagttatggacgagcgagttggtagagtttggaccaggtaggactctttctgaggaggtggcatttaaacttgagtccagagtggtacggagcagtgatgcacatacaggggaggtagatgtagatagtggggacagcaaagtcctgaggtggttctgggtttcgtatgactgtcagccagtgtgctggagtggagagaacatgacgtgcgaaggtgtggactaagggtctcccggcgtggggagtcagtctgattcctatctgccacagcaggaagccagagttagagaaactggttgaggaagtggtggtacttggctttttagtttcaaccatttctggctttgaagtctatgcatccttttttttaaaaactgttcctctggtagtctgaggcctccagtggagtttagggagcgaggctctattctcacataaaaacattagccttggcagaggcggaaacagatgagaagcggacttgaaggtcacatcgctcttctttttttttttttttgcacacctcttgtaaactgactgatataatgcttttctaggtctttaccagggctatacgtttgtcaagggctccagctaggcctaatgcccggggtcagttagagcccctatgaaatgcatacattttcctgctcctatgagaaatgggaaggggaggttgcccttttgtcccttcgaagctgcatgatggagcagggtgctgtgggatctgctggttgtggtaagggcttaggctgtgaaaggtttagctcttcgtggatggaccttgaagcatttagattctgccattcgattacctgggttcaaaccctaagcctgccactttttagtgtgaccgtatccaattcttagctgcatcgtgccgtagataaacaccctcatctgtaaaacaggaagttatggcacagacctcacgggatgagcagaagcactcaggatcgagcctagttccaagtagtgccatagtgctggtaattagcatcgaagcttagatgctcactacagtccatgtatcctttcccaaactcagctttgttgtgtactcttgtctcagtttcctcattggtcagagaggaatggctttcccattgtgtggttgaattggatgcagtacccgtagggaaggtaactgaggcataattgtagctgtaaaaggtctggtgggcagcatttcttaatctctgttaagagtggtagggacattctcctcttgaggtcagctgaatgtgctgttgactgtaggcactatattgagtcctagttcatgggaaatggggtggggtggggggctcggagaggtgctcgagcttgctcagagtcactcagctagtaaatagccaggccagggaggaaatgttagggatgctagtttaaaaacaaagtccgcatttcactgttggcgctcttagttcttcctttcccccctgtacctgttacgtgtgcttcgtgttttattgagatatacacaagtggacggtactgacccccgagggcatggctcggaagaattgcacatgtatgtgtatgtagccgccacccagttccagtgcccccagaatcgcctgcatttcaatcacttcttattccatcggcagttgtgggagccctttctggaagataagacagttgagtactgaagtttggtcattttcaagaatgtgaaaggaagggaacagacaaatcaaaaccttgccgtgccaaggtgggtggagagggtgtttttcttttaaaatacatgggtggttttaaggagaaattgaagtagttcatttagacaattgttttggtagctggccccatgtttgtggttcccaacgtgacttgagatgttattttaagtgggcagatggctttttgatagcttctttatcttttgatctcagctcttgcaaaggggaggctggtgtgcgctgctagatcagcgataaggttttctttgtaggtcggtgactttcctagcaaatacatttcaacttattattgttttaaggcctgtgtgctgctgctgatttgaagtgctgttgaagaatagctaccccccgtgatccagccctctggggaaatggtggtggacctcaggggatcccttttcttatctgtgggaggcctgctgtagagggcttcagaatcgttggccacaggcccactgtgcagctggcccttggcaggtagggtcagaagagatgattggcagccatgaggatgtagtccagaggctgagctggctgctttccctagcttgcaggaccaggtttgcagtactcagtaggtttagagagaatccatcagcagcatttttggtagagcctgttatgtgctgagcacagtgctaggaacaagcagagaagacacagactggtcctaagactcccaggagcttggggtagagccagggggcaagggttatgtgagaccctaccaagtgatatgtggccaagccccctttccttgctgggcactttgctgagtatttttgtatagtttcatttgtgctcaacagcgttttctgtgagctagattcctttaaatccctcttctgggtgagcacagaggttttgagtcctcagtgattggactgatatgggaaggagcccttctggtgtgtcttggctttatactctgaggaagtatcctattcctcttaaaaataaagaccaacaaaaatctggctggcccttacacaccctcaccgatgcctgcttcagcctctgttagcatctagtctggctttatattggtttctgctcccgagctcttgtcgccacatcccttctgttactcctgctttggggttgtcgctcatactgtttgcttcaccaagaatgtgtttacccctcagattctcctcatggagactcctcagttctaagagggtttccttagggaaggaagcttgcgcagcttagcctccttaagtccccagttttattcatagcactgatcagcaagtcaagttggaaaatgccacataggccagcatgtgagccttcccccaagttaaggaccatcttccatcctgccccattgtcctgtgtgtcctttgatccaccctcggctcctctttcatgggatcccgtcaagtgttctttatcattacactctgccttttgcttcttcaaacacaatagaaaccataagaatggaatgcctgctccttagagcccccacgtctgaacaccaacacccctcacattgtacatgaggagggggtcccttgttcccatttcaggccagtttctgttcttgactccagagcttcattttctgccatttgtccagaggctgcaaccataagccccatttgtctttcatcaggctttttttccaggtctgtctcacctggtcctctgttgacctagcctcaggccagggtctctctcttaattgctgagccaccttgccctttgcctctggtcagtacttgatgatcacccttgtccccctcccctgaagagtcaacagcacttgctttgtctgcagttttattagtccctggctttggccacactgaaaggctccgttgttttcttcttgaaagggctaactgctcctactcggtcccctctggctttgggaccgccctctacttgctttcttcaaaatctctggccctttctcctgttctgtcagcctcaactactaaacttggtgtctgcttgactgaatccttagtcttctcaagcttggctgtctcccactcagtgcccccaaacaacctcttattccatacccatgcacttgctttctaagcatccttaagcccttgctgattctagtctgtgccagggcctagtgttctagcatgttccttccttttctaaaggcactggcttccgtctgtagtaaggcctttattaggggattaatgggtgactgcaatgctagactgtaagctccgtgaggggtagggacatgctctgcattggtgaccactgtattttcacaggcctgccttagtgcatggcacttagtaggtgctcaataaatatttgttgaaagaacgagtttgagtattttttcaaatgtctccacatcaaattctaaatttcattgctgggtttgctcaccagtgtgtctcctgtcactatccctgatgcacaggttttaggtatacctgtaactgaatgaatgggtagctattggcagcctcacagaaatgagaacaatagagttgaaatgggtggggtgggaatcatctaagtggtctggagagaggatttcatgagaaagtgtccctttgttctacagacaactggtaggccatcatggttaaggttgtgggctggaggctgcacagcaaagtggcagagcagggatgtgagcctgtgtagttctgctagtgctccagttgagaactgcagcgctaggctgctggatggggcctacagctgggaatggccggacaagttgcttccttttttcagagccccagcgctattccaaaagacttagttttaagcactttattggtgctttgcatgtttcctcagtccatcgaaaagctccctgaagtattactaccatttcttccttatagatgaggagactagggcacaagagatgaggaaatttgtcccgggtcacagctgatttgtggtagagctgggactattcaacattgcattttctgggcatttattgagatgcaagatcagtttgctggcttccaacaaacattggcaaatggtataggagatagcccagcgcagtttgacatgcagtagaggtgagtattactttgaagagcaagtgtttcagttctcagtgtgtctgtgtctgtatttactcgtgaatgtgctggcttatgaggtgaaatggttttctcaccctgggctgtggccacgggagtgtcagttagatgaagcttgaagcatgcatggtaagctgccctccaatgcacacaagtcctagagttgaggctgacactcagagaaagcagggcagagtcctacataacttgatgatgtcacagcctcctcacctcacccccccaaagcacacgacttaagctgaccagaattccaagtatcttgaagccacgccccccccccccccccccagacagcatcatcagattgtctccatgggagctgggctgtgcgtgtttccctttggggctcagcacatgacccagttcgggcaagcac

SEQ ID NO: 1153 - DNA, 54306 bp, Homo sapiens
tggactgcaggtggaagaactacagttcccagcagctattgcaagctcaacctccgtgcacactcaccccaggcctcacatccggcatgcgccgtgctcgctcacagaactacactttccaactctccccacacgacccgtgacactctgtggaccgcgagcacggagcagggtttctacagctgctccccactttctcggacccggtcctggacccagcccccgactccgacacggctccaccatggaggaggcggaccgaatcctcatccattcgctgcgccaggccggcacgtaaggacagagcccccgcccacccccgaagcccacatccgggactctaaagcccaggaccccgtttcccgggaaccttaaaacccgggatcctgacattcagggctccaactccaggatcctaagaccctcacccccttacacacacacacacacacacacacacacacacgcacacacacacacgcacacacacaccgccctccctgacaccgacatcagaggcctcccaaatcctttaaccatgatatttggtacacccaaagctctgggacccagacaccttgagacgttacaaccttgaaacctcaagacccggaaccctgtaatctggggaatcttaacatcagttccctgagaccctgttatctggagaccctaagacacctgtgccctaagaaccagggagcgtaaaaccccaggaccctggcactcggggactccaaaaaatccctggaccagatacttgggatccttcaaactccagttccccaaacacctggggcttaaaaaaacccaggattctttttttttttttccttttccgagatggagtctcgctctgtcgcctaggctggagtgcagtggggtgatctcagctcactgcagcctccgcctcccaggttcaagtgattctcctgcctcagcctcccaagtagctggtattacagccgtgcgccaccttgcccggctaatttttgtatttttagcagagacagggtttcaccatgttggtcaggctggtctccaactcctgacctcaagtgatctgcccgcctccgcctcccaaagtgctgggattacaggtgtgagccaccacgcccagccaaaaaaacccagaattctaaaatctgacatcagcatttggtcaccctgacgcacgaagactcctccgttcagaggccctaaaaacccaggatgccaacatctagggagtctgatttttgtattgcttgaaactaggtggtcttgatattcagggatcttgatacccagggaccctgacatttggaacttctgaaaacagcagcctcctaaaatctagtcttctcaaaactctagcagctcaatatgtatgcaaagaacatactatctgggaaccaagaaacccagagattgtgccacctggaccctttcaccttcccagactcccaaattttgatatttttctaaactgagttctcttccacccaccattctcctactccaagatcttaggacttgaggatttccctagttcctggttttccaaatggaagtcacagtcaccaacatccaggatctgtctgaactgtaggcatcctccctgccccgaccctggtactagtgtttccaaaaggctgcagggctcagcctgatccctgttgcctgactattcctgtgatcaagctggtccccttcttcagggcagttcctccagatgtgcagaccttgcgcgccttcaccactgagctggttgtagaggctgtggtccgctgcctgcgtgtgatcaaccctgcggtgggctctggcctcagccctctgctgcctcttgccatgtctgcccggttccgcctggccatgagcctggctcaggcctgcatggtgagtggccctcctcctaatgcacacatcctctttcttcctcttttacaaagtaaccaagttcctttgcaacacttgcctttcctctgcaacacttgcctttcctctgcaacacttgcctttcctctgtcatttttcctgcggcttagttttcattagtggttaaggctgctgactgtactgccaaactgcctgagtagtttagatcctagccccaccacttggtaactgtgtgaccctaacccttctgggccccagttttcctatttgtgaaatggagatgataaatgtagtgcttttatgaggagcaaatgagtttatccagtttgcacctgggctgctcctggcttctatgttttaaatttagctgcaaaataccacccccaccccatagtatccatttcctagttccagaaaatactctgtctgggtcatatactcctaaactaatcactctgtgctctgattggcccagtctggatgacatggtcattccttttttttttttttttttgagatggagtctcactttgtcgcccaagctggagtgcagtggtgcgatcttggctcactgcaacctctgcctcccgggttcaagcaattctcctgcctcagcctcccgagtagctgggactacaggcgtgtgccaccacacccaactaattttcatgtttttagtagagacggggtttcaccatgttggccaggatggttttaatctcttgacctcatgatccacctgccttggcctcccaaagtgctgggattacaggagtgagccaccgtgcccagccttttcttttctttttttcttttttttttttttttgatgtgaagtctctctctgtcacccaagctggaatgcagtggcgtgatctcagctcacggctcactgcaacctccgtctcctgggttcaagtgattctcctgcctcagcctcccgagtagctgggactacaggcatgcaccaccatgctcagttaatttttgtatttttagtacagacggggtttcactatgttggctaggctggtcttgaactcctgacctcgtgatctgcccacctcggcctcccaaagtgctgagattacaggcgtgagccactgcgcccggccgacacggtcattcctataggacactgtgattagccactccttcaggatcctgtggagttgggataaggatgattacccaaagaaaggcatgctggttacccaaaagagtgtctgctatattacctctgtgggaaccacatatcctgcctctgctaagagcaattccaacaatgtctctgtgacagaataaataaagtgcttttcttttaaaaaatattttaatttttttagaggtaagtgtcttgctatattgcccaggctggtcttgaactcctggcctcaagagattctcctgcctctgcctcactagtagctaggactataggcacatgccaccctgcccgagaatttttaaatttttcgtagagatggggtctcgcttttgtagagatgttgcccaggctggtcttaagctcctggcctcaagcaatcttcccgccttggcctcctgagtagttgggactacaggcgtgcaccactgtgcctggtaaagagccattctgatgaaacactcacccattcccagtatagagctgagtccaggagtccagttcctgtattcaagagctgcaagtaatgccactccccctggctcactcactctgtgactttgggccagtcttttttttttttgaagcccaggctggagtgcagtggcacaatctcggcttactgcaacctcctccgcctcctgggttccagcaattctcctgcctcagcctgccgagtggctgggattacaggtgtctgccactgtgcccggctaatttttttgtatttttagtggagacagggtttcaccatcttggccaggctggtctcgaactcctgaccttgtgatccacccacctcagcctcccaaagtgttgggattacaggtgtgagccaccgcgtctggctctcttaacctttttgaggctaagtttccacatgtgtaaaatgggtataagaattgtagctactgtatagggttgctgtgaggattaaacatgagttaatgtgtgaaaagctggttataataagctttgcataaatgggattactattattggataggtccgatctggaacctgtgaatacatagtgaatggaaacactttgaactgacccaggaagtatatggtggtggagggacgatagagtaactaccgtgaaaactttcatttagatataggggactgggtggctagagttgttaaatttgggccttgcttatgcagtttctgtctcttagcaacaggtctcagagctccatccatcccttcgctctcaggttcacccagctctcaggagttgtcacattgttctctctggggctcttggtggccttatgaggcaggcagtctgtcccctggcccaggactgtatgtattcttaaggttagcacttaataggggggaagttatgtcttctgtttgcagaggagagtacacagcaggaggtgttgaggtgggggctcaggcttcctgcagttctctgttcttccctcagtgctgtctctcttggattttgttcacctgcttttgcttacattgattttagtgggggttagtgactatggcttttccagtggccaggaggtacatgtgggctgggcacgttggctcttgcatgtaatcccagcactttgggagtctgaggtgggaggatcagttgagcccaggagctcgagatcagcctgggcaacatagtgagacccccatctctacaaaaaataaaaaaaaaatagctgggcatggtggcacacgcctgtggtcccagctatgtgggaggctgaggtaggaggattgcttgagcctgggaggtccaggctgcagtgggctgtgattgcgccactgcactctagcttgggaaacagagtgaaaccccatctccaaaaaaaaaaaaaaaaaaaaagactggggacggtggctcctgtaattccagcactttgggaggtggaggcgggcagatctcaccagaggtcaggagtttgagaccagcctggccaacctggcgaaaccctgtctctactaaaaatacaaaaattagcctggtgtggtggtgtgtgcctgtaatcccagctactcaggaggctgaggcaggagaatcgcttgaacccaggaggcggaggttccagtgagtcgagattgcaccactgcactccagcctgagcgacagagcaagactcttgtttccaaaaaaataaaaaacaggtacatatggttgtctggcccccagcagccttggtttatcagcagcaggcaaaaggagttctcttaatccagctgtgtgctgtccctgtagcccccccgcaactcagcactgccatgttctggcatcttttcttcatatgccctgctcctggcaacagtttctgcaccttagccacctccatattttggcaccttccccactcctggaatgagtttctatatcagtcacagctctttgattgcatattgtggaaaaaatccaaagtaaaataccttaaaagccagtggttatacttatttgaccttgagcctccaaaataaatatatcttgcattgtgacccagtatactcctaagtatagaataatgatggcttctaagtgtactctgtgccaggccctgtggtaagtaacatggtgttaactcatttaattctcaggacaaccttctgctatatgtactgttggtataccctctttcagatgaagaaagtgaagcacagagggattaagtgatctgcctgaggtcgtatagttggtaagaggcaaagcttgggtttgaatccaggaagtctgctttcagagtctatgcagttccaaagcagtggcaactctggaagaaaaaggctttcctaggccgggtgtggtgattcccacctgtaatcccagcactttgggtggctgaggtgggcagattgcttgagcccaggagtttgagaccagcctggccaacatggtgtagccctgtctacactgaaaatacaaaaattagccgggtgtggtggcatgcacctgtaatcccagctactcgggaggctgcgtgggaggatcacttgagcccaggaggcagaggttccagtgagccaagatcacgctactgcactccagcctgagcgacagagcgagaccctgtctcaaaaaaaaaaaaaaaaaaaggaaaaaggctttctttctctcctggcctgtttcctcagtccccatcagaaccctcatgagtccttttgttctgagctattgtgcttctggtctttttgtcctgtttatttttaggcactctttctataataggtagatttgctctttacctatgatatgggctccaaatattttttcccaacttgtcattaacttttgactttgcttattctattttctttaaatattttctttcttttcatgtattcaaaagtacccatcttttcttttatggcctctggattttgagtcatagaaaggccagagctttaatcttgtttcttgttctctgtagcgttgactatcatcactctgtgactccccccagggcccagaggccttggggagctgggggaggttgggagggtggtggttagtgagaaagtgggagcgttttcagcctaggcccaagtctcccagggcaggaggaccctgcctgcttcctgatagccgcccaccaaccctcaggacctgggctatcccttggagcttggctatcagaacttcctctaccccagtgagcctgacctccgagacctgcttctcttcttggctgagcgtctgcccaccgatgcctctgaggatgcagaccagcctgcaggtactgggtgtctgggatgtgggcgggggcggtgaggggagaggagggccttctaggggctgtagggctgagagaggtagaggtggtaaaaaggttgatgggtaggggtggcggtatgtgccttcaggagagctaggcaggaggattaggcatcagagaggggctacagggcagggggcagggggctgaggttgagctgaccccggtggtgcgttggtgcggggaggggcctccctgactcaacccctgtgccctccctctctctcacttcgctctaaccacttgggcctcctgggtgctactcaaacataccccagtacactcccgcctctgcacctttgtatcgttggttacctttcccctaggtaccctcatggttcactcccttacctctttgaggttaacctcctctccgcagccctctcctgatccccacctggctgcagtctggatggtattcaggatcctattcatgatctctctcctctgctagcttgccggctccctgagggcagggacctttatccagtttgttccacgaagtagccctagtgtctagaacagcgacctgtacatagtaggtgctcggtgtttgttgaatgactgaacgtgagaacgcaagctggatagatgtgtatctctggatgggggtcaggagtggaggctggtctcctagggtatgcccttttggatttgcagcattgacatctgattcacttcctccctatcccccataggtgactcagctattctcctccgggccattgggagccaaattcgggaccagctggcactgccttgggtcccgccccaccttcgcactcccaagctgcagcacctccaggtgagacccctgactcccatggatcttctcttgtccccgtctgggtgcccagggttttggccccctacccctggcaaccctcatcccacttcaccctggagattctgagcctgctctcccaccagggctcggccctccagaagcctttccatgccagcaggctggtcgtgccagaattgagttccagaggtggtgagcatgaggctgtggggaggggtgaggaggaaggtgggggggaacctcatagcgttgccatgcggcagggccagctgactctgttcctgcctccagagccacgggagttccaggcgagtcccctgctgcttccagtccctacccaggtgcctcagcctgttggaagggtggcctcgctcctcgaacaccatgccctgcagctctgccagcagacgggccgggaccggccaggggatgaggactgggtccaccggacatcccgcctcccaccccaggtacagccagatgcctggctccctgctgtctgggctgctgctcactgacactcccgctggtcctctgctctccttccccactttgtccctcccttccattgtttcccctctgtgtgtgcttacctagctccccacctgaaagaacactggagtcagaaaaaaggagaacctgggacaagtcagtatccctcctcagagccttggtttcctgtgctaaaatttggggtagtaatagtgctctcctctcagggcagtagttagactgaataatgtgcttgagattcctggcaactggagcaatccagattggctacctgccttcatcattcattaattcattcattcatttggagtcttgctctgtcacccaggctggagtgcagtggcgtgatctcagcacactgcaacctccatctcccgggttcaagcgattctcctgcctcagcctcccaagtagctgggattacaggcttgcaccaccacacctggctaatttttatatttttagtagagacagggttttgccatgttggctaggctggtctcgaattcctgacctcaggtgatctgcccaccttggcctcccaaagtgttgggattacaggcatgagccaccgcacccggccctaatctttctctgtttctgcacttgtcactgatgttcatttttctggtttctaggtttttgcacaatttctgcctgtccccattattctagttctgtgtttttgctgctcctctttcttacctctctgtctcctcgtttctgtactgaattcctctcttgctctgtctatctatctgttcccccttctcctctgtctacttctttatctgtcccctcttcttctctgtgcacctttttatctgtgtccccttctgctctgtccacctctgtatctctccccttccttgctgtccacctatatatctgtcacccctctgcctctgtttacttcttaatctctctcctcttcctctctgtccacctctgtatctgttgccccttccctctgtccccttatctctcccttcttcctctctgtccacctctgtatttgtccctcctccccttctgtccatctctttatctgtcctctcttcttctttttttttgagacggtgtctcgctctgtcacccaggctggactacaatggcatgatcagggctcaaggcagcctcaaattcccgggctcaagcaatcttcccacctcaggcatctgagtagctgggtctacaggtgcgtgcgcccggctaatttttgtattttttgtagagatggggttttgccatgttgaccaggctggtctcgaactcctgacctgaagcaatccacccaccttggccttccaaagtgctgggattacaggcatgagccaccatgccgagccccctcttcttctctgtcaacctctttgtcccctcttcttctctatccatctctgtatctgtcccctcttcccctctgtccacttatctgtcccctcttcctctgtccacctctgcatctgtcccctccttctctctgtccacctctctgtcaccctctccctctgtccatttctttatctgtccccttttcctctctgtccacttctctttttccctccctccattctgctctcctatttctgttccctcttcctctgtgttcacccaggtatcagtacccctccccttctgtccacctttacatctgtcccctcttcctctctgtccacctctgtatttggcccccctccccttctgtctgcctctttatctgtctcctcttcctctgtgtccacatctctgtctgcccctctttttctccacctctgtgtcggccccctcctggtctgtccacttttttatctgtcctctctttctgtcttcacctctgtgtctttttacatttttatttttttatcattattattattttttgagatggagtctcgctctgtcacccaggctggagtacagtggtacgatctcagctcactgcaacctctgcctcctgggttcaagtgattctcctgcctcagcctcccacatagctaggactacaggcatgcaccaccacgcccagctaatttttgtatttttagtagagacagggtttcaccatgttggccaggatggtctcgatctcttgacctcatgatccatctgcctcggcctcccaaagtgttgtgattacaggcgtgagccaccacgcctggctgtctgtttttgtttttatatctgtagtaattttcaaacataaatgtagagagaatattctagtgaatcctatgtaccattttgccaacttttcttcatcttttctctcccaactttttctttgttgctgtattattttaaagcaaatctcagacatcatgtcatttcagctctaaatacttaggactacatctcttaactcataaggacattcagttttcaaggtaaccactggaccattttcatggctaatgaagttaacaataatatcttgtgggtttttttttgttttgttttgttttgttttttgtttttttttgttttgtttttgagacggagtctctctctgttgcccaggctggagtgcaatggcgtgatgtcgcttcactgcaacctccacttcctgggttcaagccattctcctgcctcagcccccaagtagctggaattacaggagcacactaagttttgtatttttagtagagtcggggttttaccatgttggccaggctggtcttgatctcctgacctcaggtgatctacctaccttggcctttcaaagggctaggattataggcatgagccactgtacccggccaacaatgatatcttaataccatccaatacttgagttcataatcagattttcccattatcttgaaactctgttgtccctctcttgcctctctctctctgcctctttctgtgcttggtacctttgattccctgtctctgccctgtcccccgatatcctgtctatgcttctcttggatttgggggctctaggcccacccccctctcttcccacatccttctccagcatggggatctagtgggtggagagaagtatgtctgtgagcaagaggagacccctgtcctcgaggagatcccaggctggtggagcaggagagtagagcagggcctgccttagtgggaaggctggagggtgggggtgacttgtctgtatactcttgtcagggggtccttggaggaggcagggccttgggtgctaggtgggcccctacaccttcctgcttcccccgccttttctccccaggaggacacacgggctcagcggcagcggctgcagaagcaactgactgagcatctgcgccaaagctggggcctgcttggggcccccatacaagcccgggacctgggagaactgctgcaggcctggggtgctggggccaagactggtgctcctaagggctcccgcttcacgcactcagagaagttcaccttccatctggtgggtgcgcctgaggacatgagatgtgtggatgggcgtggcaggcttggagggtggctttttgtgtcagcaccacacctttatccacacaggttcctgtgttcccactggacaggccctcgccccactgtgggatgggtacccagaggggtcccctagcttattagggacttgactggagaaaatgtggataggtgggaaccatgcaaaggtgtgggggtgttcttggggcaacaccccctttcctcaggcagtttcctttgagcatatcttctgtcctaagatgttcactctgagggccccccatccttctcatgggcatttgaggcttgagagatggggcaggtgggtaggagctgtgacagggtcagggagatttctccacgagcaagcactctggcccgaggttgcagatggtgcctttacccacatagtcacagtctggccaccatcggtgcttcagtgggcatgcatgccgcactgggggcagttctcaggggaggctgaggctgggccacgtgaggaagggccttccctggcagccaggatgcccctcgtcactccccttaggagccccaggcccaggccactcaggtgtcagatgtgccagccacctcccggcggcctgaacaggtgagcagagtggtttggaggggggtgtcccaggcccttgcttgtctactgggcctgacaccccaaccctgactggcctgggcctcccaggtcacgtgggcagctcaggaacaggagctcgagtcccttcgggagcagctggaaggagtgaaccgcagcattgaggaggttgaggccgacatgaagaccctgggcgtcagctttgtgcaggtaaggggcggaggaggggctgcgcgttgggctaggtcagaaggagggcctcggggtgtgagggactagatggggcaagaggtgctctgtagaggtctgcacatggcagaagggttcctgggagccattagggatctgtgggcctcttgagggtggctatgagaatcaggccagggtgagggtctgtgggcatctatggggcaccgcgggtctgcatgggcaggggattgaggggtcctcggagggtctgtgggcatctgtggggtacccacgggtctgcatggacaggggattagggggtcctcggggtccttggcaccagcgtggagctgttagagaggcctgtgggggccacaggggtgtacagtcatctgtggagctccatgggggctgtggcatgtgactgggtatccaccggccaggcagagtctgagtgccggcacagcaagctcagtacagcagagcgtgagcaggccctgcgcctgaagagccgcgcggtggagctgctgcccgatgggactgccaaccttgccaagctgcaggtggggttggggctgtagctgggcggagaggggcagggtggggtggggtggggttggagggcccagcctgtgtgacatgtacccatcccccaccagcttgtggtggagaatagtgcccagcgggtcatccacttggcgggtcagtgggagaagcaccgggtcccactcctcgctgagtaccgccacctccgaaagctgcaggattgcagagaggtaagcagtggggccctgggctgtgggcgggccagggcaggctcggtccctctctagggggccatccctatgctctgctcactgtcttctgcctgtgggctcatggcagctggaatcttctcgacggctggcagagatccaagaactgcaccagagtgtccgggcggctgctgaagaggcccgcaggaaggaggaggtctataagcagctggtaaggcctgtgtgagggacctgggtagcttaggagggtggggggatggtcctggggcagtgcctgctatatccctgcctagatgtcagagctggagactctgcccagagatgtgtcccggctggcctacacccagcgcatcctggagatcgtgggcaacatccggaagcagaaggaagagatcaccaaggtacactgccagggccatggagggtgggtcatgtgggctgtcaggcatagtgtggccgcacagggacctcacaccctcaggcagagctgtccagtcacactctaacacagaatagtcacacacaatccatcccagtcacccctgacacagtgacacagtccctgtctggtacacatgaggaccctccactgctagccagcctgccccaggcaggggctcatggctgccatggtgtctgccagatcttgtctgatacgaaggagcttcagaaggaaatcaactccctatctgggaagctggaccggacgtttgcggtgactgatgagcttgtgttcaaggtgtggggcaggttgggcgggggtgagtggggtgaggctgggctgctgccttgtgcatctgctaattggctggctggggtccagacccaggccctgtgcgaggctggaggtgcactgatacccagggctggctttgtttcatggaggatgaagctagtggggtggtgggagagggtggccttcttagggcatggagatggtcaagggcagcccactgatacctttgaggtccctgtgtctggtcaggatgccaagaaggacgatgctgttcggaaggcctataagtatctagctgctctgcacgaggtgaggggagacatgtgcctggggtggggctgctgggggtgggtgggactgggtgcaagccttctgctcctgttgtccccagaactgcagccagctcatccagaccatcgaggacacaggcaccatcatgcgggaggttcgagacctcgaggagcaggtgaggcctgggggcaggatggggagccaaggcgggccggggggacagttcctcaggttatgctgacagaggctgtggagccacacacagccgatggctggacacccagccctgccccttagtgcctgtgacctgggacaggcaagtggcctactgtgagccccagcttccaccccaagggccctcctgtctgcctcccagggccatgggcagaggcttcagcttaaagatgtagggggaatcctgccacatggcgaaggatgctttgggtagagggaacaccacacgaggcctggccatgggacagagcaggctgttggagttggtgggaggggcccagagtggctgtgatgggggctggtgagcaggagctgggaaaggggctgtgtgtgctgagggggcatgtgttcacattgcctcagatcgagacagagctgggcaagaagaccctcagcaacctggagaagatccgggaggactaccgagccctccgccaggagaacgctggcctcctaggccgggtccgggaggcctgaggagccgccggcagaggtctctccccagcctcaggcagggatttggggtgctggaggcagtggccaagcacatgccctagctacttcctccgctgtccagttcctcctgctgcggccttggacccagacccctgcccactgaccgcaacccttatatggggtgatagtccagcatgtggggagctcggctgcagtttattggggacggtactgtgggttgggggccttggatcccaaataaatgagtagttcctctgcagtctaagctgaggcatggatcagggctcagggaatgggagtgaggtgagtggcaggggagacacggggtatttttggcaaggcagtgtgtgtggctgtgtgtgtctgcacgggactcaagagacccactggggggctgtgcgtgtgcatatgcgtgagatacacaggtgaattctaacaggccgtgtgtgtgagcgagcacgtgttgggacctcagatcctgagggtactgacgctgcttctgtgtaggcctctgggcacacccctgtgttgacagtgcccctgtgggccctgaggctggctgtgggtgcgtgccttggggtgtgtgggttgtcagggctgtgcttgtgtgtgattgtgtgatgatgcagctttgaggttgtttgagtgtactgaggcaggctctctgtgttttggggtttgtgttgagtgagggacaggattgtgacattttgtgtgtctgtgtgacttttccagccctgaagtaatctgtgcgagcagctgaggcaggctctgtgtggctggttgtgaaggctctgtttggctgcagggctcgactggggggtgtgtctggggcggaggtgggggctggggccaggaccggggcccctctgagcagccttggggcaaaggatatgatgggggagggggtggctgccagcgggggaacaggggccctggcaggcaagacagtggaaacctcacttcttggtccctgtgggcacatccagggcctatcatccctgcccccaccacctctgcctcccaccagtttggcccctgttcgtccatcctcctttccttgatcttgaggtcaggggccaggtgtagggttggaacacctgctgggcctctggctccgtttcttgcggaactccagctcatccacggtccacacagcccccttctcgctctccacccgcacaaagcacttgtgcagactcaggttgtggcggatggcgttctgtggaaggccggggacagggagcaggtgggcgtcaacctctgaggccagcagccaccaccaacaacccacatcccgttcctccccaatgtgcctatgagcccagacccaggcctgcccactttgagctgcgatggcacttgaggccatcccagtcaccgccacctcagaggagctcaccttccaggtggcaggatggtttctgaagaaggcaaacatgcgtgtgaaccagtggtagatctcattgagtgtccgctgcttctctggagcctccaggatggcctggaagttggggggtggggtaaggggcacattccccaaacttggggtttagaggggctatgacctaccccgagccatctgacatgggggcggaattgtaggggcaggtaatcagggacaggactagatgtggggtgaagcatggggtcaaagatggggttagaaaaggggtgaagtgtcgggttgggcagggttagatgggtgtgggtatggttgttctgggattaggtaagggatcaggactgaggttgggagtggggtcttgttcagggctagggctgaagtgaggtgaaaggtctgggatggagttggagttggggttctctgtggaggtgacatttcagggttggggaaggtgaagggtcagaagtggggtcaaggatttggaaggggtaaagggccaggccaacttaagggtcagggaaggggtgggttaagagtcaggctggggtggactcaggtggggggtctaggggtgagggatgggatgacttggctttaggtcagaagccagagatggtttgaattatcgagtatcttacgtgtcagggacatggttaggtggttaggctcagggcaaggatgaggttagttgtggggttcggtgtggagtgaggctgagggtcagggaatttgatcagtttggattcaggaatgggattacagagtcagcgatgatgattgcagtgaggctatcagtcaggatggggctaggtcagggtttcagttcagagacagtcggggaatatctggtatcatgtaggggtgaggttcaggtttggggttaggtgtggcgctaggatgaaggttctgagaaggcattggggaggctgagatgaaggagttgggatggggtgatgaagttaaggatcaaatgggtgttacaaggaaaggttgggaatggtgcccagttgggggtgtattgacatactggggtacgttggggccagggaaggagatggggttgggttggcataaaggctggggaaggagttagagtaagagctggggtacgtttagggcaaggtgcagagatggggttagctttaggctattttatgggtccaggagagggttaggtatggggctgaggtggacatctggaaaggggtaggtttagggtcagaatttggcatgctctggcctggatggtggtttaggtttggatttgcggacaggtttggggtgaagccagcatgaggggtcacatttgaggcacggcttggggatccttggggctggggcttgggaatggaggaacccactctgagggcactcagagggagacaggagtttgggaggcaggtcccccaccccatctttgtcttcctcctccttggggccgagctgccctgcttacccagcggatgagcgtggcgtaggtgaaagggggtcgcatgttgtggaacttgaagtagtccatgttgtggaggaactctgtcagagggtggggatgaatcaagccccatgcaggacctcctagctagctccctgtcccctccccctacaaggtgagtctacaggcctgagatctcaccgtcaacacccgtgtccacgggcacaggtactgtttgctgagcacctgacataagttgtatcatttattctttgcaccacttctgccaaaatagttctccccgaggttgaaaagaagcggagtaacttgcacaccaaaggatgcaagaggttaaatggcagagccaggatgacagtcaaggtctctgatccctgctaagcccacaggccaggcctggtggagagcagtggataggtgagctcgggcgaatccaccccgattttccttggtcaggggaggaaaggaggtgctcctggaattacttagcagggtccctcccttctgatggccgaatatagtagctggagtccagagtgggtgaggcatggccccaatccccaagggagtcagggctaggggcccgacactcgagaccatatggggggctttcaggccacggacatcccgaaaggaagcttttgtgagcggatgcattttcccaaaggctgagtggcggcagctgcagtggtggtggtggtgggaaggggcagcatggagctcctttgcaccctccacccagagcctgtcaggattaggagcttgggggcaccgtgtagtgcaaggaccattcttacctgggaatgtgctgtttccatggctaccccacaggtgcctccggacagcaaacaggctgtcaggggcctcccgggggccagaccaggctgggacgacagggccttggctgccagcagctacgatgcagcaggagcccttgtcggatgatgcctgggtgagggggagaggctggtgacccagaggcttaaacttcccactttttactttctattttatgttttttattttttttgatactgagtcttgctctgtcgcccaggctggagtgcagtggtgcaatctcggctcactgcaacccccacctcccagattcaagcaagtcttctgcctcagcctcccgagtagctgggactacaggtgcccgtcactacgcccagctaatttttgtatttttggtagagatggggtttcaccatgttagccaggctggtctcgaactcctgacctcatgtgatccacccgcttcagcctcccaaagtgctgggattacaggcatgagccactgcgcctggctccactttatttttaaatcagtgtttttcaaagcaaggacgccctcttctaaattccagtctgaggtggaatcccacaaaacagcatgagccgtatttattagagcacaggtgcggatgtcgtatgtggccactgatgctgggaccatgaactggggttgaatagggctctttaccacccaactgtgaccttgggaaagtcacctaaacccccctggcctcaatattcctcatctgtacattcgcatcatgagaaataaattaccaccagcaaagcgctcagaaacagtgcctggcctccagggctggcttcatgggcgtgtgacctatgtggttatgtggcaccctgtgctttgtttaatgctctgtggtcgccatcttgaaatctgaacaaggggccctgcaggttacatagctggtcctgctggcacacagcctgcatctggcaagtctggctatttgcatttgctttaacaactcaggatcacagtgtttggggatcttagagtcagagggttttttttttttttttttcttgagacggagtcttgatctgtcgcctaggctggagtgcagtggtatgatctcagctcactgcaaactccgcctcccaggttcaagcaattctctgcctcagcctcccaagtagttgggactacagacacctgccaccacgcctggctaattttttgtacttttagtagacacagggtttcaccatcttggcgaggctggtcttgaactcctgacctcgtgatccacccgcctcggcctcccaaagtgctgggattacaggcgtgagccaccacgcccagccggggtcagagggtttgtaagtagaaggggacagatttccaggtctgggcatgtttggagctggggacaggggcccctagctctcaggacctgaatgtgaggttaggttccctgcaccgtgcagacctcctccctgccccccagcagtctgagtctgccaccaccagtcctggggtcgctcaccacagatgaagccttggtcagtgccattttcccagccaggtgggcctgcatggcactcagcttctccttctccagcaccagctgtgaaatggcacaaacatgaggcctcagcctggcccttctctgccacatctttgcccaggctacggtcttccctgggagtgcccgctcctcttccttcctttataccagccctcgtcccaggtgaacttggtttctggcacatggtggacagaaggttttgcgcactatccctatcccttaccctccaccgccctggcattacctgctgctccagagactgtaccatctctctctggaggagacattgtgccctgcccttctcatccagaagatggtccgcctggcagtgcctaagtagggagaagattccatgcaggtgaccacgacaggcctggtctggctcaatgctctgaatggggagggcccagaccctctgggagttctctcctctgagccccagctcccctcccctctctacctcagtctccctctcacacccctcgttcccttaacacatgcccctcagcacctactgcatgtcaggcctgaactcaccacttgagcctggccagagtgctggagataatgttggaagtgtggtgagttgagaatgggccagggaggtgagagtgggcaaagcattctgggtggagggacggcctgtgcaaaggcctggctgcaaggaggacaggacatgtggggttgctgctaagggttgtgtgtagtgtggtgtgtatttgtgtgtgtgtgtgtgtgagagagagagaaagagagagagagagagagagagagagagagagagagagagagagagagagacatatggggggactgaggggaggcagcagcagccatctagaggagctagaactttgggaacagtggaataaggctggcatgttggcatgaggagtagcagggcaaagcaggagtgcagattctagagcctggctacatgggttcaaatcccagctctgtcactcaggaactgggagattttgatcaagacacttaacctctttggcctcagtctccttgtctgtaaaatgggggtaaataacagcacaaacgtttcttattatacatacgagaaaactgaggtcgagagaagctaagtaatttgtccaaggtcacacagccagtcagggatggagctgggatttgaacccacagtctcagagtttagctcttgcatcttactacttattgggatgaagcctgagctgagatctgcaccctagacctctccccacaagccagggccggtagactggcacaggcctgggccactcacttgaggaagtcctctggctcttcgaagaccttctcacatccgggccacttgcagacaccatttgccagcagtgggtaggagctctggggcacagccgaaagggtgctggggggacagagggtgtcaggggaggggataggagggcgaggatccttcccagccctgtccactgacctgtccttcctgggtgcactgggatttgggaaggtgcagagcagtgccggctccctggacacccattccaggctggccacgttgatccctgtgggtggggacagggcacctatggaggctgtgggctgggctctggagcttggcccacaaggcctctcattttgagcttcccaccctcctgagcctcgaaaaccctgactcccagggggctctgctgtccccaaagtcccaggcttctggcagagaagcttaaagacggccattcgcaggtgctgacattttgactagctttgtaaagctctgtggttttgtgattttgacattctgcatctttaaggttctgcacctgacgttttttggagggtggagtttccaagcctctgagacctgacacctttgacccccagagtactgcaattcagaatagcctacactgctcacagccaaggatctggggacttgggggttctgtgaagccatggggtacgggctgaggtgttaccaggtgggaggccaggccgggccttgagggagaagaccccagtggcggtggtgggtggtgtgaggctgatcatggctgggctctccagggggtgcacctgcagcacaggggtccgggcgtgggcatccaccgttgagagctggggggcacatgtgggctgtggttcagcctgactcggggcccctccccacagttctcccacctgctccctcctccctgcccattcaccgtccatacctggtgcatgaaatgtggcctgtcctggaggagtgcctgtaagtggggcaaggggcccagccgtgccccggagggtgccaccatgactaggggcagtgtgggcagctgggcagaaaggcaggtgggtgagaggccatcctgatcctcactgttctgtgtctaattcaaatactctgcactgcaagcccacatggtagatgctatgatcatcccccttttacacgtatggaaactgaggctcatggagatcgagtaactttttaaagatcaaacagctaataagttgcagagctggcctcagccctgtcacctcacctacttggccccagtcctcttctcttgtcacatggggatggggacacatagctatgctcatgggactacaatacggcctcctcctctcctgagacagggattgggaggtcggggagagcctccaatctctgaggcctggcaggtggggattttcttggccctgcaacatctgcataagtcacagacttgcctgggacccagaaaccacttcctgtgccccagccagcccccctcccgcccagtgccacagtaaaggtcggcacctgtaggtccaggtaccccaccctgcctgccccatcctgggcccagggcctcacctgcagctgcgatggtggcatggggttcaaggaagaagaggaggcatgggccccgcctcgaagatctcggccctggaaggttccccctgggccccgggcccccagcaggtctgaggctttgggtgcagccctccagctgggcgaggctcctggggatgggccaagggccaaggaaggggccgagggcttgccaggcctggggttgggcatcgggtccttgtccaagggcaggctgcgtagacaataggggaaaggagtcacacgtgtgctagggcggtatgagatactcgaccacctgagccacgtggacactcctctggtcaaagcaggcattggctgggacatgtcccgaggggccccatagttgcaccccagctctagacacacacacacacacacacacacacacacaccaagaacacaggtacatgtacatacccacacatgccccacgtgcagaggtccagcacctggcttgcctgcccacgctagcacagccctggtgtggatgtgtcctctatgagggcaatggttgtttccccctccacttgagagctgtttcaagcctcaggcctctagccctccctgcaccctgcacaggctgtgtttgctcatcttgccggagctggtctcggactttctcctcggagtcctattttgccccagtgactaggcatggactcaaaagattcatctggctgctgtgagtggggctagtgaggaggctattgtaacagtcctggcaagtgatgatgctggcacagaatgggctggtggcagtggagaaggcgagaagtgggtagattctgagacttaatctgaagctggatcaggagcagtgctagcagcttggatgtagtgggcaagagggagagtcaaagtgacatgggttttagcttgagcagctggaaggaccgagctgacattacctgagatgggggacatggcggggagttggattgggtgcaaaagtgcaggtgtagatagacatgaagagtctggcattaaatatgtgagtggaggagctgagggggcagctgaatacgggggtctggatctcagggcaaggaggcgagtccaggagtgtgatcatgcacggatccagcatggcaagtgacagagaggaggagagatggggtctcttgagctggggcctgtagaagcttctctacccagcccccatcagagttcaccccaatttctggccctcaagcctggctcatgctacaccccctgcctcaaatgcccactccttctcctctttccctgtccaagccacgcaagacctgctcttctattgtcctcaccttgaaagccctccacaatggctccgggccccctgctgagccccagaaccttccactccctgagggaagcactggcttttcaggatcctataatcctggtctgagaggaagccagagctggaagggactgcccagccaaccccattatacagaaggggatgctcagatgccgagttccgtagtcccatagtgacttgagaactccacttctttctttaggaagtgtttccgtgtgcacattttataaactctctggtgtgtgtgtgtgtgtgtctccatctccccgttccacctcacagcactgagttgggcacacagctgctgagagcagcccgggggagtatagaagggttctgggggagcagttgctccttcctttctttgctgtcacctcctgggggtggttgtcagagctgtggtgctgagggagatgagtgtgagaatccaggtattaagttcttagtctcctgggggcttagaacattactgcgtgagaaacaggagtgtgggtctgtggaggctccgaacaagggcctgggagagcactggtgagatgagaaggtgagtgaatgaatgaagccagagatggggtgatgctccttcaagccaagaaataacaaagattgccagcaaccaccagaagctgggggagaggcctggagcagcttctcccttatggcccccagaaggaaccaaccctggcaacaccttgatcttggactctggcctccagaactgtgagatgatcaatttctgttgctgaagccactcagttgtggtactttgttatagcagccagaacaaactaataccgatttcggtgcaaatggatgttttccaccactctggcctggcccatgtggctggcctgtggtcacttctgaagctgcctggacacttggccagagctaagaattctccccaaacacatgtgggatggcctgactcagcaaagcatagatacattctcagacagggacatggagatgatctgtctgggggtagaggacctagagggccgggctgggcagccggcttcctgcactgtctgttgggacgtccctttctgactgggtttctcagaagctgaatgggggatgtttctgggacacagattatgttttcatatcggggtctgcatctgggccctgttgtcacagcccccgacttgcccagatttttccgccattgacgtcatggcggccggatgcgccgggcttcatcgacaccacggaggaagagaagagggcagataccccaccccacaggtttcgttccgagaactggctgccctgtcctgcagcaggcttggcccaggtggggtgacatgggtgctggtggatgtggtaggtgatgtccatctggccactatgacaagcccctagctctgaagacctggcccttcttgggttgtggagaggacccaggtttgaagctctgagagtgccaggcaggctccacagatactgggacccctggggtcttcaaatagtataacaccaggacctcagaatcatagaacagcatttcttagatttaaaggatcctagaatctcaaaaccacagactgtggggtctacggtcccaaagtctcagtatgtgtaggccagtgtccctggtgtccaaactccttggaaccatctgaaagtcaggcagcttgctgcttcatagggcctcttgcctaccaggcctggaaacagagccagcctccctagggcctcagtctccctgtccactctggaacaacgttcccaaatacatggccactccgccagagatggcaacagggggaggaggaggttgaggctggtgtgcctttggtctgggcctcatggggggagctggaaaagcctcagccttcgccaatacagagcccatcatcagactctctagaggggccccacaatcaaggttttcggggaccagcaccagctctggggacacacagcctgactgactgacatgcctccatcatcaccacgctctggccaactaggcctcctgacctatggagtccggggcctcacctagcccagctcttgtgaggctgggccccacactgtgatcgtggatcgtccaacctgtgggaagttggggtccaacgtgtgagaaggcagaagggggaatggtagcccaggttccccttcccccttctgggtgctgaggggtaaactgaggccttcagttggggagagagccagaaccagggtcccacctagagtcctgagatctaggcttggatttcaactctgccgctgcatttcggtgaggccctgagatctctggtcttcaatttgcccttctacactgagcacggagaggcgtggagtagacaagggccagggcccttctacgctgtctggttaagtcattaggtgtctgcagggcttcaagttgacaattgcccctctatccaggggactggctgagagatagggatacatagagacaaagagacacacacaaagagcgagcaagagagaacaagagatagtgagagacattgagagaaatggacacatgcatggagagccagagtgcatgtgtgcgagaggaggattgcctcaaataagaacatttgctggtctctggctggttcaactgatgctgcctgaaataatcaagaataaagaagggcaaggtgccagggacacccatggctgggtattgaattgtattgcaaagcaacaatcagcaaaacagtgtggccctggtataagaacagatactggggaagagaacagaatagaaagcttggacatggacccacatatggagagaactgaatttgtgatgaatgtggcatttcaaactggaggaccatggagtatggtttaacaaatgtgtctgagataattagggagaagataaagttattgagtgaatagtcagtccattatcccaacaacccctccctgcccagtttgaaatgtcaccatcatcatataccctaaaatgcccagatccattcaagatataagttttaacacctaatgctgatcttgggtttattgtgtgtcaggccttgtgctaagtatttactgtggttaaaaattttaatctaaacaaagactcctgaggaaggtactattataaccattgcagtacatatgaggaaatggaggtatggagaggttaagtgcctggctaaaaatcacacatagggcttggggtgacgctgggtttgtcccagacagtctggctccagtacccacactcttaacctctatagtaaatggaaaaaatgaagccataaaagagactagaagccaacataggtgaacatttatctcattttcaagtaggaaaggactttctaagcacaaaaccagagacagaagccacagaaaaaaagactaacctatttgactgtataaaaccatcataagcatcacaaaaaacaccataaacaaatagaaaaaaagcaaatgatgaattggggaaaatatttgctatatatgtaatggctgatgaaaggttaataaccattccaaataaagagctgtggcaaatcaataagggaaaaataagatgaacaccctattaggagtaaggacatgaccagacaaccaaaaaaaaaaaaaaaaaaaagcatgaatggccaatgaatagtaaaagtaatcacaagatgcaaatttcaacaatgtgataatgtgtttttcttacctgtcatgttgggaaataattaaaacataataatactcacctagggttagcttaagtagagggagcataaaataggacaaccttttggaaggagaattagcagagagggtcataaactttaaaaatgcacgccccctttgccccagcaactcccttttcaggaatccaaggaagcagtcagggatgtttatagaaaaaaacgagaaacaaccggaatgtccaacaatcggcacttggtcaaatcaatcaaagttcatgctgatgtgaggacagtcttgtccatcatgaaagatcatgtgttcaaacaatttttagtaagcttcaaaaacactactgttaattgaataaagcaggaacaaaaccaatatatagcatgattctaatttggttacagaaatactaatagctaacacttcgtgagcacttactttgtgccaaacgctgtgctaagcctgcagaatcgagctcaccccagccctgaacaacctgtttgcttcctgaatatggactctggtcacacacatgcagtcctggggtaggtccacacagctaaactacggttgacaatggtgtgaagtgctccctgcccccccgccccaagggtctcctctaaagcgatacaagcaaagttcagttaagtgctcagcttgccccggcaccttgcaatcctcctgctactagggtgaacagaactgatgctcactctcataaaatgtaaaggtcctcggcgacattactattattaaacgccagctgtgtacaaagctctaggctggatgctggctgggaaggcaggtgggggaaggcaagaaaagagagcgggagagatggaggaaaggagatcgatggagtgtggtcaagatggaggagacagagataggggagatggtcagaggccaggagagatgcggggaaagagagtctgagtgtagcgacagacagatggcgggagaaagagaggcagagaaacatgtaaaagagcaagacagggtgagcagagagacagagaaggatgagaggcatcaagagctaagagacaaagagatgagagagatgcagttgaaattttcagttgcacctggacagcatttcaagttgttcaaagctctgaaatccataaagactggcagctgacatattttaaaaatcctatccatctacgtatcaattgatgaattcatttatttttgcccctgcccatgcattaagtacttcacctttaagtcttctgccatttattctattattatttttttaaagaccttacctggctggaatcacggtagctgggtacatcccactgtaccagagggcccctgacccccccgccgtgcctacctccctgccatctcctccaatggggcccacatctggtaggggagagcagggacactcaccttggtgaagtggactgacagaaaaggatcagcctggcttgtgggaaactgtcacgtatcaaaaacaactttgcttttataccgagaagaaaaaccacgctgtacggtgtggaagccgcagacctctctcttctaataatccaaatttttttcgatgagtgtgtgcgctgataatcacggggtgggggggggttctcatagttttttttttctctctctctgtgtttctccttttcttgattatgagacttaaacggaaattttgaaattttgggtttttttctttgccctttacgagtcatctgaaaatatgatttcttcccctcaccacagaggtgagaggtatcaatgagataatagggctcatgagaaaccacagtttttaaaacaaaagtgtatagagtttgaaaaaaaaaaaacaagggaaaagaactaaaataaatcacagggccaacccgaggcaggcagagacaccattctgtgagtgagaggatatttgagggtctctggggaaagaaagagaatctgaagctctatgtgtggatgggaaatgccagggaaagagacagaatagggctgggttcccagaggcctcgccctactccaggcctcagtttccctatagatggaattgatatggtccccattgcttgaactacccggcgaggggagttctgcaccccctgcaacacccctcccacagagggtgaggggcatgtaagttacttcatggaggagaaagcggagagcccactgtcatcccctaaaattcatggacttgaagagtcggagaatccctggctcccagaatctactgacagttactgaatgaggaaagagagaaaagtctcgcctcatcacgttttagggcttgagtgccctgacccagccactgtcccactgggaaggtccctagcaggtccccaatattaatgcatccatcctcacgatgaaccccagaggcccattgggaccctgaccctcttgtttcaggaacatcatggcctgatgcttctgaggccctcagcctttggggtcttttacttcaaaaagccccagtttccaaggatttaggattccaaatatccgccatcatctcagtagctgatgtttatcttgaattttccatgggtcagatacagtgctgaacatgtctcacaagtgatcatgttcaatcctcaccatggccccttgagctccatctcatcattattgtattcctgttatacagatgagggaaacggaggtataagtagtcaagcaacttgcccaagatcacagagctggcgagtgtgggtcccgctttctttggtgctgggctttgaaatccccaagctttcctgaacttgatgttctcaggttttaaattctaggatgtgatggcagggagatcctgggatttggagagtccttggagacttgaagcttgtgaggcttttaggttgtccaggaattggcggctgcatctcttgacctcagcaggcactctattcaaccactggtcagcatggtagaccagcccccaggggcttctcctgacaggccatggtgaagacttccagctcccagcaccctgcaaagcccagggttctagtcgtccaacaaccactccagccctctacaagactggcttcagacctggggaagagaaattggaaagggctttttatttacatggtacaaatctggtggccaagatccaccccttcacccctttgccccctttcctcccccaaccttctaagccctcgtaaaaaggagggcctctttcctcaactcagactcacccttctggaaaagcccagaatgggcctgatggcctggctttgtgaagacaagaaaaaaaaaaaaaaagaatagaaaaaaaaagaccttaaaaaaatcagccaacaacaattaaaaaaaaaaaaaaaacacccaaccctccccaccattagttcaaaacaaaactttcgctggttgaggcttctgagttggtgggacacatctgagacccaaaaatggcttgggtgtgttggacagccaggggaggcaccaaggtgggatgaggtcccctgcttggaggcctgcagggaccctgtgaacagcaggtgtttaacagatgtcacggcatgtgggagggagcaagggagggggtgaggagcatgcatgtcaggaaggagtcctggggagctgattctagtgatggccccaaggttaatgaccccttgcagtgatggtcctaaggttaatgatcccttgcactgatgttcccatagttaataaccccttgctccctgcagacttgggtcggaatgttccctacacctcctgcgtaattataaaccaggccagttctatcagcagaggcattgttccctgccccagcacctgtccccctcctggaaaagggggctagttttctctctcaggatcagaggtgtgggctgcattctccttataccttccccagaccatctgtcccttactgtcactcactccatgaaagagagtggccagagatataggaggcaaacgaagtgaggatggtggccgagaatgtgagctggccccttgggcaggcccagggtgtgagagggaaatgctacggctgctgaaagccaagatccttgcagaatgggggctggggtcaggagggcagagaggggtagaggtcgctacctcccctctatactggactatatcctctctcatggagggcttctcgggaaggagactgggagggctgggagttgggggtgagtaggcaagattaaacgggtcaggaaaagtccccagagacaggggcctctgacaaagacttgaaggagatgagggagggagccagctagatatctgaggaactccaaaggaaacagccagggcaaaggtcctgaggtgggaatgtacctgatttgttcaaggtctacaagggggctggtgtggttagtgtggagagagcaagaagagaagctggaggtgaggtcagaaaggggactcggaggttagaccacgcaggaccttgtaggccatggtaaggactttggcttcaacgctgagtgaggaggaaggcatgacagggttgcaagcagaggagaaacacaaaccgtgttaggatttaacaggaagcccctgaatgctgagtgtacaatggggtctagggcctgaatgtggaagcaggggaccagcaaggagctggctactgcagtagtctaggtgactggtgatagtgctggcagtggaggtggtgagaagaggatggatttggtaaatatttttaatagacagccaaaaggatttgttgaagactgagagtcttggagccagatcgggacagacaatgcccaaaccaggtgggcaggaaggagtccctggactatttgccagcttgaacttttaggtgagaaaaaaataaagttctgtcttgcttaagcccccattattttatgatttttctgttacttgcagctgaacatattcatttctaactcatggacatcctgaacatggagacctggggagaggggctgctggaaggatcacctccctcctaggatgctgtgaggttctaatgagataacagcatgctcagaacctggcactcagtaggtgttcagtaaatcttcccaggatggagaaggaatgtatgaatggatgtgttcagcggacaaaagctgcagttgagttcccacagaaggtgagaccccaaagggagagcgaaaggagtttactagatggaagcagcagaaggaacagcactcttgggagagggaacagtagaagcagagatggggggacagaaagaagggaggtgaggcccctgtggggtgtggagtgtcaggttgggcaagaaggacagggctttgattgtgattccattagtcagaagctacccatatgcccaatcaacttctggtagcacacagtcaggtcagtgtttgctgagctgaaatttaaaaaagtgaatccttcagaaagttaaatttcctattcggccattcattcaacaatagtatcaagtcctggagagtgcttgcggctaacaatcaggggcattcttggcttgtggcactgctcaagaaaaggttgtagttgggcagggaggacccagtaagtaactaactgcaacaggacagtcattttcactttcctagttcacacaccaaggtgtggtctaggccttcaggggctctgggtattcctggggcaatggggagtcacggagggttagggagagggtaaccccatccctgagaagcacatttttcctaatggctgcctgcgttctatggttctgctgtccggccacccaatacctcagactctgtctacacagcgtcctcctctccagcctccttattggctactcatgcctcccttcacaccacctacactgcccccgtcggctctgcttttttccccatcttgcctccaagtcctccctccgtcccgctgcactatctagcctcggcattggctcatcccatactagtactgtcctttgaggtctctacgccttcaccctggctccctcattggctatccgccagctctcgtcctcgctcccgccttcagcctccacctccattggctcggctccctacacacccgcctcttggtctccttttagccttcgtattggctagctccaccttggcaccaccccttcgaagccgcagtgcacgctcacaagcctccccattggctcgctgcagccattgtcgtcatcccacgcgtggctctccattggctgttctctctctctagctaccgttccaccgcctacgcaacccgcgggatctcccactttttgggcctctgcgttcgttcccggctgccctcatcgcctgtagccattccacttttcccaccgcccacatgcctctctcgctcagacttccgcattagctgtctgcttctgttttcttcatcatggatttcgcaccacccccattccggcctctccattgattcctcgatcatcccgccccctacaccgcccactcccgggcatccccattggctgcgtgcttctccggctctcaattcgctgtacgtcatccgtgcatggctgcccattggccctctgcaatacttgtcttcatctcaccgcctatgcccccgtgagccgtacccctccgcgctggccttcccattggctgcccgccccttcaggccctgcccccgccggtcccgccgccggtgccgtcggtgccgccgccgccgccgatatggcgcgtacggcccctgtggagcccccgctgcggcattccgcgcccccctcgccggccgcgggtgagccccgcacctcggtcgaggcggcggtggccccgcggagggtgctgttcgccgacgaggccttggggctgccgctggcgcagttgcgccgctaccggccgtggggcgggcccggggcgggcaagatggcggcggcggccgggcaagatggcggcggcggcggcggggccgacgaggacgacgatggcgaggatggggatgaaggggaggaggaagaggaggcttgccccgagccctcaccgctgtgccccgtccccgctggcggggggttttacctggtccccacattttcgctgccgcccgcgccgggccgtctggagcgcttggggcgcgtcatggtggagctggaggcgctgctgccgcctcccggagcggtccccgggggtgccggggtgtgggtgcctgggggccgcccgccggtgctgcgcgggttggtacgcgtgctgaaccgctccttcgagaaggcggtgcacgtgcgggcctcacacgacggctgggcttccttttgcgaccacccagcgcgctacgtcccgcgcagcccgccgtgggcaggagcgggaggaacaggagcaggagatcccatcctggatccggggctcggcctgggtcccggccaggcatccgcctcctcgcccgacgacggcggccgcaccgaccgctttgccttccagctgccctttgctgagggcgcgggcgatggggcgcgcctcgacttcgtggtgcgctatgagacccctgagggcactttctgggccaacaaccacggccgcaactacacagtcctgctccggatcgcacccgctcccacacccactgatgccgaagggctgccccagcagcagcagctgccgcagctggagccacagcccgagtgccagggtcccgtggaggctgaggccaggcagctgaagagctgcatgaagccggtgaggcgcaggtaatgtcagccagcgccacctccgccaacgcagggctgtgtctgggatggaggacaagcattccggcccaggaacccctcaggcctgctctccaggacagggaggagggtgcattgagtcagtcagtcaaagagtgatggaggtcaaacacgtgctaggcactgttttaactggggttttattcctccatttattgagttccactgtaaagccctgaacaagacagacatctaccctaccctcaaggattcatacaggctcctatgggagacagtttgaaaaaacaagcaagcaagcagataggataaatagggacaaagttagctgctgaagggagtaaggggatagattgggagggaatgactgtgtcagacatgctgttaaagggagggcctttgaggaggtgagtcccgaatgatgataaagaagagttatgcagatacggtggggaggtgggggagagtttgtaggaaaaggaacagggaggacttttctgaggaggtttcatttaaactaagtcctggatgatgaataacagttatgtgcatatatggaacaagggtgttctaggtagaggaaacagcaagtgcaaagtcctggggtggaaatgagcttggtgtgaatgatcagcagtgtgctggagtggagagaactgcaatgacatagtgtggaccaagggctttgccagtggggggtagagcagattctctttctgacagagcaggaaaccaggattccagaggtggagaaactggttgaggcagtgatggcacctggctcttccagttcacccatgcctgaccttgaagcctgtgcactctactgttaacgctgtaatctacttttgagtcctgtggaggcgaggggctgagcccatgctctcacaagaaagcagtggctctagcagagagacagaaccagatgggtactggacttgaagtttttgtcccttgtttttttgccacaccacctgtgatcatttagggacagggagaaataatcagttataccccagggggccccagaagatttccctaggtttcctctatcaagctatgagttctttaagggcagcagctagtcctgattctttttgcggtcacctaagtctggcccaggatcactagattctccctaaaatgtatacatttccctgttcctgggaggactgggaatggaaatgggaaaatgctttttggaccttgtatgtatacgcttggtcagaagcccctggctgcagtaagacatttgtgggttctgctggttctggtaaggccttaggctgtgagtggttcagaaaggtctagctccggtctggtgggcagatgtgcctgggtaactgagcaggcaggcaggtacccactcacccacctgtgagccccaccataatctgagacttcatttaaagggggcaggcagcatggtttttcttacagcattaagagtgtggattctggcatagattgcctgggttcaaatcctggcgctgccacttactggccttgtgaccttggccaacgcatttaactacaccatgcctcaggaccctcacctgtaaaacagaattatagcatctactttacgggataagagtaaaggtgctcagaaccgagtctggctcaaagtagtatcatacaggtgttagctagtgtcagtatttagggagccacacctacagtttcctggattcctctcctaaattcggctccgcccatcagctgtgtggccttgcctccgtttccttctctgctaagggaaatgacagtcactttgcatggttggattgaatgcagcaaacatgggcaaggtaactgaagcatggtggtaactgcaaaagataactggccagcatttactgatttctgtgctatgaacatcagatccattctctccgtgaggcctgctgtgcatgctgtgttgtgtaggtgctatgattatccccatttagtagaggggagacaggtagctcagagagatgagccagcttgctcaaagcctctcagctagtgagtgacagggccagggaagaaatgctagggacatttatttttttctatttttttttttttaaactggtcctctagaaagcgtggcatgattcagggcaaattctggatttcactcttggtgttcccagcatgtcgtgctttccttttacctttttttttttttttgctttatcgaggtatacctacataaagtgtactgatattctgtgtatagcccagtggatttgtacatatgtatgcacttgtgtagccaccacccagatgaagatactgagcaggtccagtaccccagagctaccttcatttctatcactttcccaagctgtcatccccgccggctgtcatgggaaccctgtctgtaagatgcgacagtttgggtaaaggagtttggtcattttaaagagtgtgaaaggcagagaacagagaaatcaaaaccttgcagggccaaggtgggtggagagggtgtttttcttttaacatacatgggcggttttaaggagaaattgaagcagcctgttcagacaattgttttggtatctggccccaggtctgtggttcctaacatgacttgtgatattattttaagtgggcagatggctttttgatagcttctttatctttcgatctcagctcttgcaaaggggaggttggtgctcattgcaagatcagcgataagggtttctttgtaggtcggtggctttcttggtgagtacatttcaacatattattgttttagaacctgtgtgctgccagtgacttgcagcactgttgaagactagccaccctttgtgacctagccctcttgggaaatggcggaggatctcagggtatatcccttacctgtgggagccctatcagagggcttcctgttgaggaaatgttggctgtaggccctctgtgcactgagcacagccacatcaggtgagggcatgggagaagtccgtggtagccatcaggatagagttcagaaacccaaatggctgctttccctgggttgctggaccaggcatttggtaactctaaagcttagagatgattcatcgacaagcatttattgactgcctactgtgtgctgggcacagtgctaggttccagcagggaaagagatgcagagtggtcctaagatgtcacagggcttgtgggatggagtacagaggatttgttgtatgagacctggctgagcccctgctcttcgccaggcacttcactgagtactatattttcatgcaaggtctggtttaattccgacaacattccctgtgaagtagagggttttaaatttctctttcctggatgagcaaactgaggctcccagagtccaaagtcctagggctggtgtggggaaaagccctcctgatcttccttggcacttgacactaccctttggaagtgtcctattcttcttaaaagtaaagaccaagagagcctcaccatggtcttcaagcaccctcccatcccattccccaatctggcctccactggctcatagtcttaacaccagtggtctttctgagctcctgtcaccatggtctttctgttactccaaagggcctcgctcctttctgctgcagggcctttgcccctgctgtttccttcaccaggaacatttatcccgtaccccttgcagtctcctccagtgttgatccctcagttctaagaggacttccccaggggagcctgtccaccccagtgtcctcgggcccctggctttttcatagcactcatcagcccagcacgtgctaagctttgttagagaatgtcccatggcagagcagatgaacatcgccaccagtcgaggggtcatcggccaccctgcctagcagttctactatatttttttgatccactcgtttctcctctgaagtgactctttcaaatgttctttaccttcagactttctctcctgcttcaaaaaacaaaacagaagccataagaatggaactccctataacttgtggcccccaagtctgcacgctgatttccctcccctgtgttacagatgacgaggagtcccttcttgctcaggccacttctccctcctgtgctctgggtcccagtttctgctacttgctctagaatctgacatcatcagtcaccttttctctcctggcaggttttctgctgccctccttgcttgatcctctattcacctttgcctgtgccagcatcccttctgtctccgctgaccccacgttctctccctcctgcttctggccagcacctcatcaccctccccttcactgctgacccctgcagagttgcctgtacttgccttctgcacttgctcacccccgtaagtgttagcccccggcatctgccagattctgcaggtggttttttagttttcctcttgaagtggttgaccactcctacttaaaacactttgtcttcccttgccttgagaccacactctgctggttttcctcttaactctctggcccttctctttctcctggctcttcccttagcttcatgtatccaaactcggcatctccacttgactgatggcccaaataattcctcaaactcaccttgtcggggactgcattcatcacctctcccacagtgttcccaagcagcctctcactcccctacctccccacttgctcgttttgcttttcagcatccttaagtaagccctgcctgaccctgtagattgggccagggacccttattctagggcattctttccttttctaaaggcactgatcgcagtttgtagttatatctttattagggggttgctggatgactctctgccccgctagactgtaagctccgtgaggggtagggacatggtctgctttcattcaccactgtattcctgcaggcctgccacagtgcctggcacttagcaggtgctcaataaatgtttgttgaaataatgagtttgagtatttttttaatgtcttcctccatactgaattgtaagcttcctagttgggtttgctcaccatggtgtctccaggatccgtcactggggctgatgcacaggaaggcccactgtctttcagtgcacctataactgaagggatggggatccaacctgctatctgagttggcagcctcaggggaaaccagaataactggagttgaacgggacaagtcaggggcatcttagttttctgtagagtgaggaattaatgtgaacgtgatcctcttttatgccacagaaaacttggtagggcattatggttaaggacatgggcctgaggccacgtgctaagaaagtggcagagctgggatctgagcctgtgtggtcctgctctagtgctccagctcttagctactgtaccaggctgggtgatgcattttaccagcagggcaacactgggcaagttgctttcctttcagagcttcagtttccctcaatggaaatttggagggggttactgttaagtgctttataggtacttttcaaatatttctttgatctgctgaacaactcactgatgtaggtattattatcccctccttagagatgaggtaactgaggcacagagaggttaagtaacttgccccaggtcacacagctgataggtggcagagctggaattgttcaaaattgcatatcctaaccctttattgagttgtgaaatcaatttactgggtttcaacaagcattaaaaagaaaaaggaaatagcataagaaatgccagtgtatcaccacatgcagtaaaggtaagtattgtttcactcgaagaacaaccatttttcagttatttatatgtctgtttacacgtgtgggtgtgctgggttatgatgtagaatggatttcttactatgggtcgtggccaaagaatgaagtcatggctgttgaagaagctcatggcacgagaaactgctctccctctaccccactggatcacccgcaagtcccagagttgaggctgacacacttgttggggaaggcaaagcagtgccccacataacttggtggctttcacagccaccttcaaaccctgttcttttcagaaagcagatggctcagggtaactgcaattctgagtatcgtggggcaggtttctgaagccactcatccccccggaaagtcagcgttatcttcaggttgactacatgggagccggggtctgctgagtttccctttgggtttcagtgcctgacccactttgggctggcaaaattctttgaaaacatgaatgctgggggtgctccagaggactcgggtggtggtggcaatggcagtctgtgactgctctgaaagtctgctttgcttttctccacagggcttgtcagccctcacccgctcgcttactctgtgactggcgaatcacctttcttggctttcttggctggcctaggccggggccaacaccacctctttccaaatcctcaccctctggtctcctcggggcctatcagcttggcagccattgtgtttcctgatggccggaggaatttgcacgcccaggagactggcgtgcaggcctgagatggccccttttagtcgacaccagcttgactagtgctcactagcacccaaatgatgcatgtccaagattttccagatctgtgtgccctggcccctatggctcactgcccttgaggggatgccacgtggtacttgtggggctggtgccaaaagaacaggtttccttcttgaaaacgagcaggcatactgcaggtacagttttgttcttaatcttctccctccccatttttctaagaacccctcttctctgttaccgatcagtgagtcagtatacatttgtacttgatttctcttactatcctcatgttgattgaagtcatagctgcccttgagtttttactgtgaaagacggttcaaagataacttgtttctttttaagcccacaatttcaaactctcttcaaagtggagccctcctggagtgtttgttaccagcgtggttgtgtagtcagtgagtgtagagatgcagttccttgagttttagtttttgcatttgtaaaaaggaagggtgttgttttgaaggatagatgtgaaggttttcaaatgccttggtgtgtcaatgagaggggcccatggtggaggaggtgaacaatacatgcttgtgctttctgctttcatatctgactttggagaacgacttgtttgcttctgtcgatgttgtggatcttgggattggctcaatggcgtgacctgctttttggatgttctcgccctcctcagccatggaaagggtgctctgggggctgaaggattgattgtgtatttgtttttctttctccttcctccaactgaattgtggagtcctttacctgctggctagctgattcctgagtgttctcctttttctgtctcacatctatgactgcagtggcttttagaagcctgtttgtaatatatgtccggactaggccagatggaggagaaggcttgcctgctactgcgcacaggtgggagggctggctttctgtctgtctgtgggccttcttgaagaggcttggtttagaagatcctaggaggaggatgttttctgtcatgaaggactatggtaacaaaaagaagtaagttagtgcagcctggcagaaattgtgttgaaacaaaagtccaaagacctggattttaggaccacggaggggattggtgtgagaccaagctggtttgctctgaatctctctttctcatctgtgatgtgtgggaggtggcagctgggctcccagagtcacccaccctaggccctgtagtattctgattcaagtacctctggtgggatttgtgagtcctagacagtagagaaagacagacggtcccttctagactctagatccgtatatatggttcaaatgttctccccgagggtgtttatagaaagcagttcttgcagccattctgtgtctagtggcctcctagccacgcatgtcccaggcccatggaggtagggaaatggggaatgaatatgtgggcaaaggcaggtccaaagaaaagcctgcatgaaggaggagggagggatcttgtctagtattgatgcctccctctatctacttctagaaaggatggagatgggttgggtaagaccccagtctccctcatccaagaagcagcagctgactgggtaagagccaaaaggcctgggttgtgatgtgaagtgtatgaccttgagccatttactcagcctctgttttatcctctgtaaaatggagacaatagtactgcctgcttcagaggattacaagtacctgtctcatagggtgattgtgaggattgaattaacacatgttgcccaggcaccgtggctcatgcctgtagtactaggacttcgggaggctgagatgggaggatcgcttgagtccaggagttcacgaccagcctggtcaacgtaggaagaccccatctctaaaaacaaaatacaaaaaaacaaaaacaaaaaccaaaaaaccccaaaaacttctttaaaaaaatgtgaagcacttagaacagtgtgtaatgccatagtaggtactatgtatgggtcagatggtgatactcgtttctgtgaaggtaattggttatgggttttcaaaaagtttcaaccaggccgggcacggtggctcatgcctgtaaccccagcacattgggaggccgaggagggtggatcacctgaggtcaggagtttgagaccagcctggccaacatggcgaaaccccgtctctattaaaaatacaaaaattagctggctgtgatggtgggtacctgtaatccctgatacttgagaggctgaggcaggagaatcacttgaacctgggaggcagaggttgcagtgagccgagatcatgctattgcactccagcctggcgacagaacgagactccatctcaaaaaaaaaaatttttcaaccattgtcagaagtatcaagaatgtcacattgcctcttaggaagaaaaaggtgtgggcattcgccccagctcctctcaggttttagtcaatgcttccctcatttaccttaatctgtagacacttgatactcattttcagaataagaacagtgacttctccatgatgagatgccacccctgggaggacccacctgaaatgcactcggcttatgccactcagggatctgactggcctggtgaaggaggagcaagacccataaatatctacagttgattcaatcccagctgtgtgtcaggccctgatttctggctgtccatcctcattcctcttgactgccctgtgcttagtgcacatcctgactccccggggctctgttttatgagtgaggaggtgaagcgacctgccaggctgatacggggacgagagggttagcatagggacccaggcctctgtgacctccctcccagtctccatttgcattccttcctctgcctcacagtcttgtctacctgccatttcttagaaaaggtgtttttgttttgttttgttttgttttgtttttgtgagataatctctcactctgtcgcccaggctggagtgcagtggtgtgatttcggctcactgcaatctctacctcttgggttcaagcgattttcctgcctcagcctcccaggtagttgggattacaggcgcccaccaccacgcccagctaatttttatatttttagtagagacggagtttcaccatgttggccaggctggtcttgaattcctgacctcaggtgatccacctgcctcggcctcccaaactgttgggattacagatgtgagccaccgcgtctggccctttttttttttttgagactgagtttcactcttgtcccctaggctggagtgcaatggcgcgatcttggctcactgcaacctccgcctcccaggttcaaatgattctcctgcctcggcctcccaagtagttgggactatgggcgtgcaccgccatgcccagctaattttttgtatttttagtagagacagggtttcatcatgttgcccaggctggtcttgaactcctaacctcaagtggtctccctgcctcggcctcccaaagtgctggaattacaggtgtaagccaccacgcccagccgaaaagatgggttcttctatcttttctctttccatagccaggaatgtatcctaaagaaatgatacaagtgtcgataaaactatgcccaatgctgtttgctggtttgctttgcaacctctaaatgaaagaacttagctgctcagtaggaagggaatggtatgatatgagtattaagcagccatttgaaatgtttgcaaaagtgtataatgatgtttcttactgttaaatggacaaagctagctgtgaaattatgtctgtagaatctaaatgatttcgtagaatatctggaaggaaattttccagaatggtaacagtagttgtctctggctgatgtgtgattgtttttcttgcttctttagactttcctgtattttgcgaattttctataatgaggctgtaggacttttaggatgaggggataaacaaaggcagcagaagagaaaacagcagctgtcaggtgaaggtgggctagcacagaggctcagaaggtgccagtgggtggcagaagtgacctctcagggtattattagatccatgtactctctcctctgccctgcaggcctgccgaggaggaactgaagacgaagaacatggatgataacacctttgccatgggtaagcaattggcaagcttcggaagttttagcttgtatttaccatgtctttcttcctactgtttttctttctataaaaatgaaaaaggctgggctcagtggctcatgcctgtaatcccagcactttgggaggctgaggcaggaggattgcttgaggccaggagttcgagatgagcctgggcaacatagtgagacctcatctcttaaaaaaaaaaaaaaaagacgggcatgctggcatgcatccgtagtccctgctactcgggaggctgagctgggaggatcatttgagcctgggaggttgatgctgcagtgagtcatgattgtgccactgcaccccagccttggtgacacatcgagaccctatctcaaaaaaaaaatgaaggggtaccctctgctttagattgtcacagaaagcttcagaggcaaaactgccagttggctaggatggcagattttcttaacaaaaccatacctacttgtatgcctgtcttgcccaatgctgcctttctcttccctctagcagagcatcctgatgtccaggagtcagtgggtccactggtagcccccacccctctccgtccatggccccagatgacacttcaggtaagtgggtccttgcagccttggagtagacagcccaataggaggctcacagtgtgactattgctgggctgggtggtggggcccactagctctgggtcctccctgggttggagggagggcacaaaactcagaacctgatgggggagggggagaatgcagttactcagctgggcttgtagaaatgtcatttgttaatttagcaaaaatttatggagtgcttgttctgtgctaagcactgttacaaacatgcaaaaacgctctttgagggggcttatgtgttagtagggtgagacatgataaagtaatagaatatatggtactttaggtgatgatgagtgataaggaaaaatagaaaggaatagggagtgggtgagagactctgtgtgtgtgtgtgtgtgtgtgtgtgtgtgtgtgtgtgtgtgtgtgtgttgtgggcgggggtcggttgcaactttagattgggtggcctgggaaggctttagtgattagtgagatctgagcgaagatctgaggaaggtgagagagtgagccacgtggataactaagggaagaacatcccaggcgagtgtgaagttcctgaggtgaggccatgactaacgtgtgtgagggacagtgtagaagccagcgcagcaggggcagaacgagggagggggagagtggtgcggggtgagggagagaggtggctgaggacagattgggtggtgcctcacaggccatggtgaagactttggcttttactccgagtgagggggagccgcaagagcattgtggacggaggagggatgtaatctgatttaggatttaacaggctccctctggctgctgcttggaaaatagacgtcagagtaagggtggaaacaggcgactcgtgaaggggaggccactgcagtggtccaggcgagagtgatggtaggtaggggaggtagagacattttggagggtgtgtgtgtgtgtgtgtgtgtgtgtgtgaactttttaattacaaaaagtttcaaacatacaaaagtaaaatagtataatgaacctacgtacaccatcccccagcttcagtaaatatcaacacgtgctcattcttattttatctgtaccccgtctcctccctcccattccctctggaattattttggaagacatccagacatcatcccatccataaatacttctgtttgtatctcagaaaattaagaactcttttttgtttttttttttgagacagagtctcactctgtcacctaggctggagtgcagtggtgtgatctcagcttactgcaacctctgcctcctgggttcaagcaagtacatccagctaatttttgtatttttagtagagacgggatccgttgccttggcctcccaaagtgctgggattacaggtgtgagccatcacgtctggccagaaaattaagaattcttaaccccacaatactatcatcacaccttagaaaataaacggtaattcctcagtatcatcaagtatttggtcagtgttcaagttttcttctctcataagtgtttaggatccaaacaaagttgacatgttgcatttgattgatgtgtctctttagatttttaaaatctcccccactttgtttctttgcaatttgttggttgaagaaactttgcttgtcctgtagaattttccagtctgggtctggctgattacatccaggtggaaatacatttcttactccatttttattaatttattaattatattaattaatgtaatcttattaaatttatttaatttatcaaattgtattaaacgaatgtatttaatcttttattattaaattaactagaattaactctatttaattctattattcccacttcctttattagctagaattcttctctaaagaaaaactgtcccacaccagctatttggctactttgagatatagtttgtgcagaaaaagcagtgtaaatatttaattttttccattttatttaccagttttcagagaagtactactacaaaggtgaccaataaaaggatttttggttttgtgtcattatgaactcatgaattctaaacatatttgaatgagtttcaatccattgcacttatttgtttgctttttttgatgcttaaattgaactatccctggctagtaggagcttattgagatgggctactctgtccttttgacacgccctcatcattctgtgagcctttctcacatcttccatgacaatatgtgctaggttcatcctgtactctccctgccccaagcctggaaacagccatttctttcttgcttttcttttctttattttctttttctttttctttcttttctttcctttcctttctttccttacctttcctttctttctttcctttcctttgtctctctctttctttcttttcttttactttatttttctttcctttctttcctctctctctctctttctttcttttttctttttctttcttttttttttttttttttttgagtcagagtctttctctgtcgcccaggctggagtgcagtggcacaatctcggttcactgcaacctctgccttctgggttcaagcaattctcctgtctcagcctcttgagtagctgggattacaggcacatgccaccacacccggctgatttttgtatttttgcagagatggggtttcaccatgttggccaggctggtcttgaactcctgacctgcctggtgatccacctgccttggcctcccaaagtgctgggattacaggcgtgagccactgagcctggccagaaacagctatttctttaaggagcactgattcctttcagtggagagtggcattcaaaggccaagatttgggggctcggcatgcttgctgctactagattggtcattgtttctaggccctttcaaaagatggagctaggaaataattgttttttaaagagaagatgatacatcatgggttcatatggacatcctggctatgttttgggatttttttgcattttattttttttaaaatttttttaatttttaatttttgaggggacatagtaagtgtatatatttatggagatgttttgatataggcatgcattgtgtaataatcacatcatggagaatgaggtatgcatctcctcaagcatttatcctgtgtgttacaaacaatccacttacactctttattttttttttttttgagacaaagtctctgtcgcccaggctgcagtgcagtggcacagtctcggctcactgcaatctctgccctctgggttcaagtgattctcctgcctcagcctcttgagattacaggcgcacaacaccacgcccagctaatttttgtatttttggtagagacggggtttcaccatgttggccaggctggtctcgaactcctagtttcatgtgatccgcccgccttggcttcctaaagtgcttggattacaggtgagagccactgtgcctggctacttacacttttagttattttaactggctctgttttgaaggtaagccagcagtatttagtgatgatcattcaccaaatattcacacccaccgaattcctcagctttataatctgcaagaagccctgttttactgcatccaattgtgttattttaccatagatgacagtctttggagtctagacagtgacagagggcgctttaaggcatttttatatagaaacccctgtggggctggctgtgggctgtcacacttcttactgtctctgcttgttccatcccctcctctgcttcattcccttgctttttctctgcccccttgccccggccatggctccaggtttctgacgttccgatgactggcaaccccgcagaagaaggtgatgtccccagaagcagtccacctgtggcttttacagaggtcctccaggcaccggccatcaggattcccccctcctcccctctctgtggcctgggtggctcccccagagaccaggcctcagggcccgatgcgagcgagggggccaccgggcctttcctggagcccagtcagcagcaggcagaggccacatggggagtatcgagtgagaatggaggggggctggaggctgtgagtgggtcagaggagctgctcggtgaggacaccatcgaccaggagctggagcagctctacctgtctcacctgagccgcctacgggctgctgtggctgcgggtggggcagggggtggtggggagggctccacagatggagggatgtcccccagccatcccctgggcatactgacggaccgcgacctgatcttgaagtggcctggccctgagcgggccctgaacagcgccctggctgaggagatcacgctgcactatgcccggctggggcgtggcgtggagctcatcaaggacaccgaagaccctgatgatgaaggggagggtgaagaggggctctctgtcacaccctccagcccagaaggggacagccccaaggaatcgcctccagaaatcctctccggggcccgttctgtggtagccacgatgggagatgtgtggctcccatgggcagagggctcaggatgtgacggccctgtggttctgggtacagagggtcagttcattggggatcctgagaaagggatgggcaaggacaccagctctttgcacatgaatagggtgatagctggggtgactgagtccctgggggaggccgggacagaagcccagatagaggtcaccagtgagtgggcaggcagcttggatcccatatctggcaaggagccagcctctcccgtccttctgcaggggcaaaatcccaccctcctcagtcccttgggggccgaagtctgtctctctagtgtagccaggcctcatgtgagctcccaggatgaaaaggatgcaggcccaagccttgaacccccaaagaagtctcccaccctagcagtccctgcagaatgtgtgtgtgcactgcctcctcagctccgggggcccttgacccagactctgggggtcctggccgggctagtggtggtccctgtggctctgaacagcggtgtgtccctcctggtgcttgcgctgtgcctctctctggcttggttctcataggctctgcttgtgggatcagcagaggcttaagatgggatacatggcctgtgcagtgaggggacctgggtcctttgcttctgagaatgctcaactgaaagagaggccttctcatccccaagctctccagtcaacacagggctccctgtggtgacaccagtggagatgagggaacgggtagatggtgtgagtgaggggaacttttagagtggaactgggcatgtcctccgcctaccccccgagcctgtatttatttttgtataattctctggatgagggagagtggtcgtgagctggtcttggggcacaattacccagagatatatttattaacagccaacctgtgcaacctgctggagctttatttttaatttaatttatatagagtacctattattatatgccacaatagagctctatgagaaacagtgtcttgcggtgtagtgttctcctgtttgggcatgagtgtgcagggtggtcactttctgtgggaggatcacagtggggagttgggggtgggacgtggtcgcctgctgctgcttcaacatgtctttccttgaagatgtgtgtctcctcgtctcgtggtcctaatccatatggttctttgtcttttccacattctgcctgtgggaccctacaggtgtgtatttggatggtggtggtgggagccagggaggaagagtggcagccacatgagggtttggtgtcagtcacatggttgcagtggtagctgtggtctcctgtggatgtggggacatcagttgtgaatcagccacaaggttttgaggttactgaaaaaacagcctttgacaccagcagggagaccccttagtccctgagataaggaaggcctcagaaaggaaagaggagttaatgtactgcagtacttggtagcacagttgctgtccacagacatcacatttctactaaaaacaggaagcccagaagctttgaaagaaagatatatatttattgcatgcaaataaaaaactgctcaacaaaataaaacaccacatatttatttacttccctttacagcaaaacctattggaagaaatatctatacgagctttcttcagttcttctatgatgcctttctgaaatagccccaatcagatcttttttgcccaaccatttcagcaaaactgctgaagatattcacattgttatagccatggttaagtctcagatgtcatcttacttgggatattggcagcatttgacatagttgatcatctctaccttgcaaccctttcttcacttggtttccaagataccacactctcctcatttcccttcttcctcactggccactgtgcaaagctgtcagttctcttgaaactgctttgtaggttcaatgcaaatccaaccacaattccaatagagttttgcctgtgtgtagatcatgacacattaattcttaaatttatgtagaagtgccaagactagccaggacactgatacttattgtaatggtatattcagatggcacgatatttttgcaagagtagacaaatcgaccaataaaaaaacagtgatctcggaaacagtgtagacacactcgtgtagacacagaactggtgaccaaggaagtgtgttagaccagtggggaaatgattggattttgaataaatagaacaattggttacccgcattgaaaaatatgaacttggatccctactttacaacacaaataaaaataattctaagtgggtttaaagcctaaatgcgaagggcaaaaccaaagcgctttaagaatacaatgaggcagggccgggtgctgtggctcactcttgtaatcccagcactttgggaggtctagatgggcggatcaggagtttgagaccaccagcctggccaacatggtgaaaccccgtctctactaaaaatacaaaaattagctgggcatccacctgtagtcccagctgtttgggaggctgaggcgggacaatcgtttgaactcagggggcagaggttgcagtgagccgagatggcaccactgcactccagcctgggccacagatcgagactccatctcaaaaacaaaacaaaacaaaaaacaaggcaaaacaccttcgtatactcatggtagcaaagtttttcttcatcacgacacagaaacaaccataaatgaaaattacgaaacattcagtgaccttaaaattaggaatgtccattgatcaaaagacaccataaagagagtgaaaaccttatgtagtaggttgctatgaataaaagcaaaacaaaaaggagtgaaaacacaagtgaaaaattgggaggagataatggaatcacatataactgatgaagggctcaaaccttagatgccaataagcatctaaataaattgtggtatattcgcagaatggaatattgtataatgagaatggaagatccataactgcacgaaagcatacagatgaatcacaaaaagccaaaaaaaagcttccacactgatccatttatgcaaagttcacaagcaggcaaaactcatgaattaccacctaaatggtgacattgtaaagaaaagcgaggggctgattaccagagtcaggatagtgttcacctctggcagagggagggatgtggctgagaaggggcccagagga

SEQ ID NO: 1154 - DNA, 21598 bp, Homo sapiens
acactgccagggccatggagggtgggtcatgtgggctgtcaggcatagtgtggccgcacagggacctcacaccctcaggcagagctgtccagtcacactctaacacagaatagtcacacacaatccatcccagtcacccctgacacagtgacacagtccctgtctggtacacatgaggaccctccactgctagccagcctgccccaggcaggggctcatggctgccatggtgtctgccagatcttgtctgatacgaaggagcttcagaaggaaatcaactccctatctgggaagctggaccggacgtttgcggtgactgatgagcttgtgttcaaggtgtggggcaggttgggcgggggtgagtggggtgaggctgggctgctgccttgtgcatctgctaattggctggctggggtccagacccaggccctgtgcgaggctggaggtgcactgatacccagggctggctttgtttcatggaggatgaagctagtggggtggtgggagagggtggccttcttagggcatggagatggtcaagggcagcccactgatacctttgaggtccctgtgtctggtcaggatgccaagaaggacgatgctgttcggaaggcctataagtatctagctgctctgcacgaggtgaggggagacatgtgcctggggtggggctgctgggggtgggtgggactgggtgcaagccttctgctcctgttgtccccagaactgcagccagctcatccagaccatcgaggacacaggcaccatcatgcgggaggttcgagacctcgaggagcaggtgaggcctgggggcaggatggggagccaaggcgggccggggggacagttcctcaggttatgctgacagaggctgtggagccacacacagccgatggctggacacccagccctgccccttagtgcctgtgacctgggacaggcaagtggcctactgtgagccccagcttccaccccaagggccctcctgtctgcctcccagggccatgggcagaggcttcagcttaaagatgtagggggaatcctgccacatggcgaaggatgctttgggtagagggaacaccacacgaggcctggccatgggacagagcaggctgttggagttggtgggaggggcccagagtggctgtgatgggggctggtgagcaggagctgggaaaggggctgtgtgtgctgagggggcatgtgttcacattgcctcagatcgagacagagctgggcaagaagaccctcagcaacctggagaagatccgggaggactaccgagccctccgccaggagaacgctggcctcctaggccgggtccgggaggcctgaggagccgccggcagaggtctctccccagcctcaggcagggatttggggtgctggaggcagtggccaagcacatgccctagctacttcctccgctgtccagttcctcctgctgcggccttggacccagacccctgcccactgaccgcaacccttatatggggtgatagtccagcatgtggggagctcggctgcagtttattggggacggtactgtgggttgggggccttggatcccaaataaatgagtagttcctctgcagtctaagctgaggcatggatcagggctcagggaatgggagtgaggtgagtggcaggggagacacggggtatttttggcaaggcagtgtgtgtggctgtgtgtgtctgcacgggactcaagagacccactggggggctgtgcgtgtgcatatgcgtgagatacacaggtgaattctaacaggccgtgtgtgtgagcgagcacgtgttgggacctcagatcctgagggtactgacgctgcttctgtgtaggcctctgggcacacccctgtgttgacagtgcccctgtgggccctgaggctggctgtgggtgcgtgccttggggtgtgtgggttgtcagggctgtgcttgtgtgtgattgtgtgatgatgcagctttgaggttgtttgagtgtactgaggcaggctctctgtgttttggggtttgtgttgagtgagggacaggattgtgacattttgtgtgtctgtgtgacttttccagccctgaagtaatctgtgcgagcagctgaggcaggctctgtgtggctggttgtgaaggctctgtttggctgcagggctcgactggggggtgtgtctggggcggaggtgggggctggggccaggaccggggcccctctgagcagccttggggcaaaggatatgatgggggagggggtggctgccagcgggggaacaggggccctggcaggcaagacagtggaaacctcacttcttggtccctgtgggcacatccagggcctatcatccctgcccccaccacctctgcctcccaccagtttggcccctgttcgtccatcctcctttccttgatcttgaggtcaggggccaggtgtagggttggaacacctgctgggcctctggctccgtttcttgcggaactccagctcatccacggtccacacagcccccttctcgctctccacccgcacaaagcacttgtgcagactcaggttgtggcggatggcgttctgtggaaggccggggacagggagcaggtgggcgtcaacctctgaggccagcagccaccaccaacaacccacatcccgttcctccccaatgtgcctatgagcccagacccaggcctgcccactttgagctgcgatggcacttgaggccatcccagtcaccgccacctcagaggagctcaccttccaggtggcaggatggtttctgaagaaggcaaacatgcgtgtgaaccagtggtagatctcattgagtgtccgctgcttctctggagcctccaggatggcctggaagttggggggtggggtaaggggcacattccccaaacttggggtttagaggggctatgacctaccccgagccatctgacatgggggcggaattgtaggggcaggtaatcagggacaggactagatgtggggtgaagcatggggtcaaagatggggttagaaaaggggtgaagtgtcgggttgggcagggttagatgggtgtgggtatggttgttctgggattaggtaagggatcaggactgaggttgggagtggggtcttgttcagggctagggctgaagtgaggtgaaaggtctgggatggagttggagttggggttctctgtggaggtgacatttcagggttggggaaggtgaagggtcagaagtggggtcaaggatttggaaggggtaaagggccaggccaacttaagggtcagggaaggggtgggttaagagtcaggctggggtggactcaggtggggggtctaggggtgagggatgggatgacttggctttaggtcagaagccagagatggtttgaattatcgagtatcttacgtgtcagggacatggttaggtggttaggctcagggcaaggatgaggttagttgtggggttcggtgtggagtgaggctgagggtcagggaatttgatcagtttggattcaggaatgggattacagagtcagcgatgatgattgcagtgaggctatcagtcaggatggggctaggtcagggtttcagttcagagacagtcggggaatatctggtatcatgtaggggtgaggttcaggtttggggttaggtgtggcgctaggatgaaggttctgagaaggcattggggaggctgagatgaaggagttgggatggggtgatgaagttaaggatcaaatgggtgttacaaggaaaggttgggaatggtgcccagttgggggtgtattgacatactggggtacgttggggccagggaaggagatggggttgggttggcataaaggctggggaaggagttagagtaagagctggggtacgtttagggcaaggtgcagagatggggttagctttaggctattttatgggtccaggagagggttaggtatggggctgaggtggacatctggaaaggggtaggtttagggtcagaatttggcatgctctggcctggatggtggtttaggtttggatttgcggacaggtttggggtgaagccagcatgaggggtcacatttgaggcacggcttggggatccttggggctggggcttgggaatggaggaacccactctgagggcactcagagggagacaggagtttgggaggcaggtcccccaccccatctttgtcttcctcctccttggggccgagctgccctgcttacccagcggatgagcgtggcgtaggtgaaagggggtcgcatgttgtggaacttgaagtagtccatgttgtggaggaactctgtcagagggtggggatgaatcaagccccatgcaggacctcctagctagctccctgtcccctccccctacaaggtgagtctacaggcctgagatctcaccgtcaacacccgtgtccacgggcacaggtactgtttgctgagcacctgacataagttgtatcatttattctttgcaccacttctgccaaaatagttctccccgaggttgaaaagaagcggagtaacttgcacaccaaaggatgcaagaggttaaatggcagagccaggatgacagtcaaggtctctgatccctgctaagcccacaggccaggcctggtggagagcagtggataggtgagctcgggcgaatccaccccgattttccttggtcaggggaggaaaggaggtgctcctggaattacttagcagggtccctcccttctgatggccgaatatagtagctggagtccagagtgggtgaggcatggccccaatccccaagggagtcagggctaggggcccgacactcgagaccatatggggggctttcaggccacggacatcccgaaaggaagcttttgtgagcggatgcattttcccaaaggctgagtggcggcagctgcagtggtggtggtggtgggaaggggcagcatggagctcctttgcaccctccacccagagcctgtcaggattaggagcttgggggcaccgtgtagtgcaaggaccattcttacctgggaatgtgctgtttccatggctaccccacaggtgcctccggacagcaaacaggctgtcaggggcctcccgggggccagaccaggctgggacgacagggccttggctgccagcagctacgatgcagcaggagcccttgtcggatgatgcctgggtgagggggagaggctggtgacccagaggcttaaacttcccactttttactttctattttatgttttttattttttttgatactgagtcttgctctgtcgcccaggctggagtgcagtggtgcaatctcggctcactgcaacccccacctcccagattcaagcaagtcttctgcctcagcctcccgagtagctgggactacaggtgcccgtcactacgcccagctaatttttgtatttttggtagagatggggtttcaccatgttagccaggctggtctcgaactcctgacctcatgtgatccacccgcttcagcctcccaaagtgctgggattacaggcatgagccactgcgcctggctccactttatttttaaatcagtgtttttcaaagcaaggacgccctcttctaaattccagtctgaggtggaatcccacaaaacagcatgagccgtatttattagagcacaggtgcggatgtcgtatgtggccactgatgctgggaccatgaactggggttgaatagggctctttaccacccaactgtgaccttgggaaagtcacctaaacccccctggcctcaatattcctcatctgtacattcgcatcatgagaaataaattaccaccagcaaagcgctcagaaacagtgcctggcctccagggctggcttcatgggcgtgtgacctatgtggttatgtggcaccctgtgctttgtttaatgctctgtggtcgccatcttgaaatctgaacaaggggccctgcaggttacatagctggtcctgctggcacacagcctgcatctggcaagtctggctatttgcatttgctttaacaactcaggatcacagtgtttggggatcttagagtcagagggttttttttttttttttttcttgagacggagtcttgatctgtcgcctaggctggagtgcagtggtatgatctcagctcactgcaaactccgcctcccaggttcaagcaattctctgcctcagcctcccaagtagttgggactacagacacctgccaccacgcctggctaattttttgtacttttagtagacacagggtttcaccatcttggcgaggctggtcttgaactcctgacctcgtgatccacccgcctcggcctcccaaagtgctgggattacaggcgtgagccaccacgcccagccggggtcagagggtttgtaagtagaaggggacagatttccaggtctgggcatgtttggagctggggacaggggcccctagctctcaggacctgaatgtgaggttaggttccctgcaccgtgcagacctcctccctgccccccagcagtctgagtctgccaccaccagtcctggggtcgctcaccacagatgaagccttggtcagtgccattttcccagccaggtgggcctgcatggcactcagcttctccttctccagcaccagctgtgaaatggcacaaacatgaggcctcagcctggcccttctctgccacatctttgcccaggctacggtcttccctgggagtgcccgctcctcttccttcctttataccagccctcgtcccaggtgaacttggtttctggcacatggtggacagaaggttttgcgcactatccctatcccttaccctccaccgccctggcattacctgctgctccagagactgtaccatctctctctggaggagacattgtgccctgcccttctcatccagaagatggtccgcctggcagtgcctaagtagggagaagattccatgcaggtgaccacgacaggcctggtctggctcaatgctctgaatggggagggcccagaccctctgggagttctctcctctgagccccagctcccctcccctctctacctcagtctccctctcacacccctcgttcccttaacacatgcccctcagcacctactgcatgtcaggcctgaactcaccacttgagcctggccagagtgctggagataatgttggaagtgtggtgagttgagaatgggccagggaggtgagagtgggcaaagcattctgggtggagggacggcctgtgcaaaggcctggctgcaaggaggacaggacatgtggggttgctgctaagggttgtgtgtagtgtggtgtgtatttgtgtgtgtgtgtgtgtgagagagagagaaagagagagagagagagagagagagagagagagagagagagagagagagagacatatggggggactgaggggaggcagcagcagccatctagaggagctagaactttgggaacagtggaataaggctggcatgttggcatgaggagtagcagggcaaagcaggagtgcagattctagagcctggctacatgggttcaaatcccagctctgtcactcaggaactgggagattttgatcaagacacttaacctctttggcctcagtctccttgtctgtaaaatgggggtaaataacagcacaaacgtttcttattatacatacgagaaaactgaggtcgagagaagctaagtaatttgtccaaggtcacacagccagtcagggatggagctgggatttgaacccacagtctcagagtttagctcttgcatcttactacttattgggatgaagcctgagctgagatctgcaccctagacctctccccacaagccagggccggtagactggcacaggcctgggccactcacttgaggaagtcctctggctcttcgaagaccttctcacatccgggccacttgcagacaccatttgccagcagtgggtaggagctctggggcacagccgaaagggtgctggggggacagagggtgtcaggggaggggataggagggcgaggatccttcccagccctgtccactgacctgtccttcctgggtgcactgggatttgggaaggtgcagagcagtgccggctccctggacacccattccaggctggccacgttgatccctgtgggtggggacagggcacctatggaggctgtgggctgggctctggagcttggcccacaaggcctctcattttgagcttcccaccctcctgagcctcgaaaaccctgactcccagggggctctgctgtccccaaagtcccaggcttctggcagagaagcttaaagacggccattcgcaggtgctgacattttgactagctttgtaaagctctgtggttttgtgattttgacattctgcatctttaaggttctgcacctgacgttttttggagggtggagtttccaagcctctgagacctgacacctttgacccccagagtactgcaattcagaatagcctacactgctcacagccaaggatctggggacttgggggttctgtgaagccatggggtacgggctgaggtgttaccaggtgggaggccaggccgggccttgagggagaagaccccagtggcggtggtgggtggtgtgaggctgatcatggctgggctctccagggggtgcacctgcagcacaggggtccgggcgtgggcatccaccgttgagagctggggggcacatgtgggctgtggttcagcctgactcggggcccctccccacagttctcccacctgctccctcctccctgcccattcaccgtccatacctggtgcatgaaatgtggcctgtcctggaggagtgcctgtaagtggggcaaggggcccagccgtgccccggagggtgccaccatgactaggggcagtgtgggcagctgggcagaaaggcaggtgggtgagaggccatcctgatcctcactgttctgtgtctaattcaaatactctgcactgcaagcccacatggtagatgctatgatcatcccccttttacacgtatggaaactgaggctcatggagatcgagtaactttttaaagatcaaacagctaataagttgcagagctggcctcagccctgtcacctcacctacttggccccagtcctcttctcttgtcacatggggatggggacacatagctatgctcatgggactacaatacggcctcctcctctcctgagacagggattgggaggtcggggagagcctccaatctctgaggcctggcaggtggggattttcttggccctgcaacatctgcataagtcacagacttgcctgggacccagaaaccacttcctgtgccccagccagcccccctcccgcccagtgccacagtaaaggtcggcacctgtaggtccaggtaccccaccctgcctgccccatcctgggcccagggcctcacctgcagctgcgatggtggcatggggttcaaggaagaagaggaggcatgggccccgcctcgaagatctcggccctggaaggttccccctgggccccgggcccccagcaggtctgaggctttgggtgcagccctccagctgggcgaggctcctggggatgggccaagggccaaggaaggggccgagggcttgccaggcctggggttgggcatcgggtccttgtccaagggcaggctgcgtagacaataggggaaaggagtcacacgtgtgctagggcggtatgagatactcgaccacctgagccacgtggacactcctctggtcaaagcaggcattggctgggacatgtcccgaggggccccatagttgcaccccagctctagacacacacacacacacacacacacacacacaccaagaacacaggtacatgtacatacccacacatgccccacgtgcagaggtccagcacctggcttgcctgcccacgctagcacagccctggtgtggatgtgtcctctatgagggcaatggttgtttccccctccacttgagagctgtttcaagcctcaggcctctagccctccctgcaccctgcacaggctgtgtttgctcatcttgccggagctggtctcggactttctcctcggagtcctattttgccccagtgactaggcatggactcaaaagattcatctggctgctgtgagtggggctagtgaggaggctattgtaacagtcctggcaagtgatgatgctggcacagaatgggctggtggcagtggagaaggcgagaagtgggtagattctgagacttaatctgaagctggatcaggagcagtgctagcagcttggatgtagtgggcaagagggagagtcaaagtgacatgggttttagcttgagcagctggaaggaccgagctgacattacctgagatgggggacatggcggggagttggattgggtgcaaaagtgcaggtgtagatagacatgaagagtctggcattaaatatgtgagtggaggagctgagggggcagctgaatacgggggtctggatctcagggcaaggaggcgagtccaggagtgtgatcatgcacggatccagcatggcaagtgacagagaggaggagagatggggtctcttgagctggggcctgtagaagcttctctacccagcccccatcagagttcaccccaatttctggccctcaagcctggctcatgctacaccccctgcctcaaatgcccactccttctcctctttccctgtccaagccacgcaagacctgctcttctattgtcctcaccttgaaagccctccacaatggctccgggccccctgctgagccccagaaccttccactccctgagggaagcactggcttttcaggatcctataatcctggtctgagaggaagccagagctggaagggactgcccagccaaccccattatacagaaggggatgctcagatgccgagttccgtagtcccatagtgacttgagaactccacttctttctttaggaagtgtttccgtgtgcacattttataaactctctggtgtgtgtgtgtgtgtgtctccatctccccgttccacctcacagcactgagttgggcacacagctgctgagagcagcccgggggagtatagaagggttctgggggagcagttgctccttcctttctttgctgtcacctcctgggggtggttgtcagagctgtggtgctgagggagatgagtgtgagaatccaggtattaagttcttagtctcctgggggcttagaacattactgcgtgagaaacaggagtgtgggtctgtggaggctccgaacaagggcctgggagagcactggtgagatgagaaggtgagtgaatgaatgaagccagagatggggtgatgctccttcaagccaagaaataacaaagattgccagcaaccaccagaagctgggggagaggcctggagcagcttctcccttatggcccccagaaggaaccaaccctggcaacaccttgatcttggactctggcctccagaactgtgagatgatcaatttctgttgctgaagccactcagttgtggtactttgttatagcagccagaacaaactaataccgatttcggtgcaaatggatgttttccaccactctggcctggcccatgtggctggcctgtggtcacttctgaagctgcctggacacttggccagagctaagaattctccccaaacacatgtgggatggcctgactcagcaaagcatagatacattctcagacagggacatggagatgatctgtctgggggtagaggacctagagggccgggctgggcagccggcttcctgcactgtctgttgggacgtccctttctgactgggtttctcagaagctgaatgggggatgtttctgggacacagattatgttttcatatcggggtctgcatctgggccctgttgtcacagcccccgacttgcccagatttttccgccattgacgtcatggcggccggatgcgccgggcttcatcgacaccacggaggaagagaagagggcagataccccaccccacaggtttcgttccgagaactggctgccctgtcctgcagcaggcttggcccaggtggggtgacatgggtgctggtggatgtggtaggtgatgtccatctggccactatgacaagcccctagctctgaagacctggcccttcttgggttgtggagaggacccaggtttgaagctctgagagtgccaggcaggctccacagatactgggacccctggggtcttcaaatagtataacaccaggacctcagaatcatagaacagcatttcttagatttaaaggatcctagaatctcaaaaccacagactgtggggtctacggtcccaaagtctcagtatgtgtaggccagtgtccctggtgtccaaactccttggaaccatctgaaagtcaggcagcttgctgcttcatagggcctcttgcctaccaggcctggaaacagagccagcctccctagggcctcagtctccctgtccactctggaacaacgttcccaaatacatggccactccgccagagatggcaacagggggaggaggaggttgaggctggtgtgcctttggtctgggcctcatggggggagctggaaaagcctcagccttcgccaatacagagcccatcatcagactctctagaggggccccacaatcaaggttttcggggaccagcaccagctctggggacacacagcctgactgactgacatgcctccatcatcaccacgctctggccaactaggcctcctgacctatggagtccggggcctcacctagcccagctcttgtgaggctgggccccacactgtgatcgtggatcgtccaacctgtgggaagttggggtccaacgtgtgagaaggcagaagggggaatggtagcccaggttccccttcccccttctgggtgctgaggggtaaactgaggccttcagttggggagagagccagaaccagggtcccacctagagtcctgagatctaggcttggatttcaactctgccgctgcatttcggtgaggccctgagatctctggtcttcaatttgcccttctacactgagcacggagaggcgtggagtagacaagggccagggcccttctacgctgtctggttaagtcattaggtgtctgcagggcttcaagttgacaattgcccctctatccaggggactggctgagagatagggatacatagagacaaagagacacacacaaagagcgagcaagagagaacaagagatagtgagagacattgagagaaatggacacatgcatggagagccagagtgcatgtgtgcgagaggaggattgcctcaaataagaacatttgctggtctctggctggttcaactgatgctgcctgaaataatcaagaataaagaagggcaaggtgccagggacacccatggctgggtattgaattgtattgcaaagcaacaatcagcaaaacagtgtggccctggtataagaacagatactggggaagagaacagaatagaaagcttggacatggacccacatatggagagaactgaatttgtgatgaatgtggcatttcaaactggaggaccatggagtatggtttaacaaatgtgtctgagataattagggagaagataaagttattgagtgaatagtcagtccattatcccaacaacccctccctgcccagtttgaaatgtcaccatcatcatataccctaaaatgcccagatccattcaagatataagttttaacacctaatgctgatcttgggtttattgtgtgtcaggccttgtgctaagtatttactgtggttaaaaattttaatctaaacaaagactcctgaggaaggtactattataaccattgcagtacatatgaggaaatggaggtatggagaggttaagtgcctggctaaaaatcacacatagggcttggggtgacgctgggtttgtcccagacagtctggctccagtacccacactcttaacctctatagtaaatggaaaaaatgaagccataaaagagactagaagccaacataggtgaacatttatctcattttcaagtaggaaaggactttctaagcacaaaaccagagacagaagccacagaaaaaaagactaacctatttgactgtataaaaccatcataagcatcacaaaaaacaccataaacaaatagaaaaaaagcaaatgatgaattggggaaaatatttgctatatatgtaatggctgatgaaaggttaataaccattccaaataaagagctgtggcaaatcaataagggaaaaataagatgaacaccctattaggagtaaggacatgaccagacaaccaaaaaaaaaaaaaaaaaaaagcatgaatggccaatgaatagtaaaagtaatcacaagatgcaaatttcaacaatgtgataatgtgtttttcttacctgtcatgttgggaaataattaaaacataataatactcacctagggttagcttaagtagagggagcataaaataggacaaccttttggaaggagaattagcagagagggtcataaactttaaaaatgcacgccccctttgccccagcaactcccttttcaggaatccaaggaagcagtcagggatgtttatagaaaaaaacgagaaacaaccggaatgtccaacaatcggcacttggtcaaatcaatcaaagttcatgctgatgtgaggacagtcttgtccatcatgaaagatcatgtgttcaaacaatttttagtaagcttcaaaaacactactgttaattgaataaagcaggaacaaaaccaatatatagcatgattctaatttggttacagaaatactaatagctaacacttcgtgagcacttactttgtgccaaacgctgtgctaagcctgcagaatcgagctcaccccagccctgaacaacctgtttgcttcctgaatatggactctggtcacacacatgcagtcctggggtaggtccacacagctaaactacggttgacaatggtgtgaagtgctccctgcccccccgccccaagggtctcctctaaagcgatacaagcaaagttcagttaagtgctcagcttgccccggcaccttgcaatcctcctgctactagggtgaacagaactgatgctcactctcataaaatgtaaaggtcctcggcgacattactattattaaacgccagctgtgtacaaagctctaggctggatgctggctgggaaggcaggtgggggaaggcaagaaaagagagcgggagagatggaggaaaggagatcgatggagtgtggtcaagatggaggagacagagataggggagatggtcagaggccaggagagatgcggggaaagagagtctgagtgtagcgacagacagatggcgggagaaagagaggcagagaaacatgtaaaagagcaagacagggtgagcagagagacagagaaggatgagaggcatcaagagctaagagacaaagagatgagagagatgcagttgaaattttcagttgcacctggacagcatttcaagttgttcaaagctctgaaatccataaagactggcagctgacatattttaaaaatcctatccatctacgtatcaattgatgaattcatttatttttgcccctgcccatgcattaagtacttcacctttaagtcttctgccatttattctattattatttttttaaagaccttacctggctggaatcacggtagctgggtacatcccactgtaccagagggcccctgacccccccgccgtgcctacctccctgccatctcctccaatggggcccacatctggtaggggagagcagggacactcaccttggtgaagtggactgacagaaaaggatcagcctggcttgtgggaaactgtcacgtatcaaaaacaactttgcttttataccgagaagaaaaaccacgctgtacggtgtggaagccgcagacctctctcttctaataatccaaatttttttcgatgagtgtgtgcgctgataatcacggggtgggggggggttctcatagttttttttttctctctctctgtgtttctccttttcttgattatgagacttaaacggaaattttgaaattttgggtttttttctttgccctttacgagtcatctgaaaatatgatttcttcccctcaccacagaggtgagaggtatcaatgagataatagggctcatgagaaaccacagtttttaaaacaaaagtgtatagagtttgaaaaaaaaaaaacaagggaaaagaactaaaataaatcacagggccaacccgaggcaggcagagacaccattctgtgagtgagaggatatttgagggtctctggggaaagaaagagaatctgaagctctatgtgtggatgggaaatgccagggaaagagacagaatagggctgggttcccagaggcctcgccctactccaggcctcagtttccctatagatggaattgatatggtccccattgcttgaactacccggcgaggggagttctgcaccccctgcaacacccctcccacagagggtgaggggcatgtaagttacttcatggaggagaaagcggagagcccactgtcatcccctaaaattcatggacttgaagagtcggagaatccctggctcccagaatctactgacagttactgaatgaggaaagagagaaaagtctcgcctcatcacgttttagggcttgagtgccctgacccagccactgtcccactgggaaggtccctagcaggtccccaatattaatgcatccatcctcacgatgaaccccagaggcccattgggaccctgaccctcttgtttcaggaacatcatggcctgatgcttctgaggccctcagcctttggggtcttttacttcaaaaagccccagtttccaaggatttaggattccaaatatccgccatcatctcagtagctgatgtttatcttgaattttccatgggtcagatacagtgctgaacatgtctcacaagtgatcatgttcaatcctcaccatggccccttgagctccatctcatcattattgtattcctgttatacagatgagggaaacggaggtataagtagtcaagcaacttgcccaagatcacagagctggcgagtgtgggtcccgctttctttggtgctgggctttgaaatccccaagctttcctgaacttgatgttctcaggttttaaattctaggatgtgatggcagggagatcctgggatttggagagtccttggagacttgaagcttgtgaggcttttaggttgtccaggaattggcggctgcatctcttgacctcagcaggcactctattcaaccactggtcagcatggtagaccagcccccaggggcttctcctgacaggccatggtgaagacttccagctcccagcaccctgcaaagcccagggttctagtcgtccaacaaccactccagccctctacaagactggcttcagacctggggaagagaaattggaaagggctttttatttacatggtacaaatctggtggccaagatccaccccttcacccctttgccccctttcctcccccaaccttctaagccctcgtaaaaaggagggcctctttcctcaactcagactcacccttctggaaaagcccagaatgggcctgatggcctggctttgtgaagacaagaaaaaaaaaaaaaaagaatagaaaaaaaaagaccttaaaaaaatcagccaacaacaattaaaaaaaaaaaaaaaacacccaaccctccccaccattagttcaaaacaaaactttcgctggttgaggcttctgagttggtgggacacatctgagacccaaaaatggcttgggtgtgttggacagccaggggaggcaccaaggtgggatgaggtcccctgcttggaggcctgcagggaccctgtgaacagcaggtgtttaacagatgtcacggcatgtgggagggagcaagggagggggtgaggagcatgcatgtcaggaaggagtcctggggagctgattctagtgatggccccaaggttaatgaccccttgcagtgatggtcctaaggttaatgatcccttgcactgatgttcccatagttaataaccccttgctccctgcagacttgggtcggaatgttccctacacctcctgcgtaattataaaccaggccagttctatcagcagaggcattgttccctgccccagcacctgtccccctcctggaaaagggggctagttttctctctcaggatcagaggtgtgggctgcattctccttataccttccccagaccatctgtcccttactgtcactcactccatgaaagagagtggccagagatataggaggcaaacgaagtgaggatggtggccgagaatgtgagctggccccttgggcaggcccagggtgtgagagggaaatgctacggctgctgaaagccaagatccttgcagaatgggggctggggtcaggagggcagagaggggtagaggtcgctacctcccctctatactggactatatcctctctcatggagggcttctcgggaaggagactgggagggctgggagttgggggtgagtaggcaagattaaacgggtcaggaaaagtccccagagacaggggcctctgacaaagacttgaaggagatgagggagggagccagctagatatctgaggaactccaaaggaaacagccagggcaaaggtcctgaggtgggaatgtacctgatttgttcaaggtctacaagggggctggtgtggttagtgtggagagagcaagaagagaagctggaggtgaggtcagaaaggggactcggaggttagaccacgcaggaccttgtaggccatggtaaggactttggcttcaacgctgagtgaggaggaaggcatgacagggttgcaagcagaggagaaacacaaaccgtgttaggatttaacaggaagcccctgaatgctgagtgtacaatggggtctagggcctgaatgtggaagcaggggaccagcaaggagctggctactgcagtagtctaggtgactggtgatagtgctggcagtggaggtggtgagaagaggatggatttggtaaatatttttaatagacagccaaaaggatttgttgaagactgagagtcttggagccagatcgggacagacaatgcccaaaccaggtgggcaggaaggagtccctggactatttgccagcttgaacttttaggtgagaaaaaaataaagttctgtcttgcttaagcccccattattttatgatttttctgttacttgcagctgaacatattcatttctaactcatggacatcctgaacatggagacctggggagaggggctgctggaaggatcacctccctcctaggatgctgtgaggttctaatgagataacagcatgctcagaacctggcactcagtaggtgttcagtaaatcttcccaggatggagaaggaatgtatgaatggatgtgttcagcggacaaaagctgcagttgagttcccacagaaggtgagaccccaaagggagagcgaaaggagtttactagatggaagcagcagaaggaacagcactcttgggagagggaacagtagaagcagagatggggggacagaaagaagggaggtgaggcccctgtggggtgtggagtgtcaggttgggcaagaaggacagggctttgattgtgattccattagtcagaagctacccatatgcccaatcaacttctggtagcacacagtcaggtcagtgtttgctgagctgaaatttaaaaaagtgaatccttcagaaagttaaatttcctattcggccattcattcaacaatagtatcaagtcctggagagtgcttgcggctaacaatcaggggcattcttggcttgtggcactgctcaagaaaaggttgtagttgggcagggaggacccagtaagtaactaactgcaacaggacagtcattttcactttcctagttcacacaccaaggtgtggtctaggccttcaggggctctgggtattcctggggcaatggggagtcacggagggttagggagagggtaaccccatccctgagaagcacatttttcctaatggctgcctgcgttctatggttctgctgtccggccacccaatacctcagactctgtctacacagcgtcctcctctccagcctccttattggctactcatgcctcccttcacaccacctacactgcccccgtcggctctgcttttttccccatcttgcctccaagtcctccctccgtcccgctgcactatctagcctcggcattggctcatcccatactagtactgtcctttgaggtctctacgccttcaccctggctccctcattggctatccgccagctctcgtcctcgctcccgccttcagcctccacctccattggctcggctccctacacacccgcctcttggtctccttttagccttcgtattggctagctccaccttggcaccaccccttcgaagccgcagtgcacgctcacaagcctccccattggctcgctgcagccattgtcgtcatcccacgcgtggctctccattggctgttctctctctctagctaccgttccaccgcctacgcaacccgcgggatctcccactttttgggcctctgcgttcgttcccggctgccctcatcgcctgtagccattccacttttcccaccgcccacatgcctctctcgctcagacttccgcattagctgtctgcttctgttttcttcatcatggatttcgcaccacccccattccggcctctccattgattcctcgatcatcccgccccctacaccgcccactcccgggcatccccattggctgcgtgcttctccggctctcaattcgctgtacgtcatccgtgcatggctgcccattggccctctgcaatacttgtcttcatctcaccgcctatgcccccgtgagccgtacccctccgcgctggccttcccattggctgcccgccccttcaggccctgcccccgccggtcccgccgccggtgccgtcggtgccgccgccgccgccgatatggcgcgtacggcccctgtggagcccccgctgcggcattccgcgcccccctcgccggccgcgggtgagccccgcacctcggtcgaggcggcggtggccccgcggagggtgctgttcgccgacgaggccttggggctgccgctggcgcagttgcgccgctaccggccgtggggcgggcccggggcgggcaagatggcggcggcggccgggcaagatggcggcggcggcggcggggccgacgaggacgacgatggcgaggatggggatgaaggggaggaggaagaggaggcttgccccgagccctcaccgctgtgccccgtccccgctggcggggggttttacctggtccccacattttcgctgccgcccgcgccgggccgtctggagcgcttggggcgcgtcatggtggagctggaggcgctgctgccgcctcccggagcggtccccgggggtgccggggtgtgggtgcctgggggccgcccgccggtgctgcgcgggttggtacgcgtgctgaaccgctccttcgagaaggcggtgcacgtgcgggcctcacacgacggctgggcttccttttgcgaccacccagcgcgctacgtcccgcgcagcccgccgtgggcaggagcgggaggaacaggagcaggagatcccatcct

SEQ ID NO: 1155 - DNA, 15714 bp, Homo sapiens
gcacagggacctcacaccctcaggcagagctgtccagtcacactctaacacagaatagtcacacacaatccatcccagtcacccctgacacagtgacacagtccctgtctggtacacatgaggaccctccactgctagccagcctgccccaggcaggggctcatggctgccatggtgtctgccagatcttgtctgatacgaaggagcttcagaaggaaatcaactccctatctgggaagctggaccggacgtttgcggtgactgatgagcttgtgttcaaggtgtggggcaggttgggcgggggtgagtggggtgaggctgggctgctgccttgtgcatctgctaattggctggctggggtccagacccaggccctgtgcgaggctggaggtgcactgatacccagggctggctttgtttcatggaggatgaagctagtggggtggtgggagagggtggccttcttagggcatggagatggtcaagggcagcccactgatacctttgaggtccctgtgtctggtcaggatgccaagaaggacgatgctgttcggaaggcctataagtatctagctgctctgcacgaggtgaggggagacatgtgcctggggtggggctgctgggggtgggtgggactgggtgcaagccttctgctcctgttgtccccagaactgcagccagctcatccagaccatcgaggacacaggcaccatcatgcgggaggttcgagacctcgaggagcaggtgaggcctgggggcaggatggggagccaaggcgggccggggggacagttcctcaggttatgctgacagaggctgtggagccacacacagccgatggctggacacccagccctgccccttagtgcctgtgacctgggacaggcaagtggcctactgtgagccccagcttccaccccaagggccctcctgtctgcctcccagggccatgggcagaggcttcagcttaaagatgtagggggaatcctgccacatggcgaaggatgctttgggtagagggaacaccacacgaggcctggccatgggacagagcaggctgttggagttggtgggaggggcccagagtggctgtgatgggggctggtgagcaggagctgggaaaggggctgtgtgtgctgagggggcatgtgttcacattgcctcagatcgagacagagctgggcaagaagaccctcagcaacctggagaagatccgggaggactaccgagccctccgccaggagaacgctggcctcctaggccgggtccgggaggcctgaggagccgccggcagaggtctctccccagcctcaggcagggatttggggtgctggaggcagtggccaagcacatgccctagctacttcctccgctgtccagttcctcctgctgcggccttggacccagacccctgcccactgaccgcaacccttatatggggtgatagtccagcatgtggggagctcggctgcagtttattggggacggtactgtgggttgggggccttggatcccaaataaatgagtagttcctctgcagtctaagctgaggcatggatcagggctcagggaatgggagtgaggtgagtggcaggggagacacggggtatttttggcaaggcagtgtgtgtggctgtgtgtgtctgcacgggactcaagagacccactggggggctgtgcgtgtgcatatgcgtgagatacacaggtgaattctaacaggccgtgtgtgtgagcgagcacgtgttgggacctcagatcctgagggtactgacgctgcttctgtgtaggcctctgggcacacccctgtgttgacagtgcccctgtgggccctgaggctggctgtgggtgcgtgccttggggtgtgtgggttgtcagggctgtgcttgtgtgtgattgtgtgatgatgcagctttgaggttgtttgagtgtactgaggcaggctctctgtgttttggggtttgtgttgagtgagggacaggattgtgacattttgtgtgtctgtgtgacttttccagccctgaagtaatctgtgcgagcagctgaggcaggctctgtgtggctggttgtgaaggctctgtttggctgcagggctcgactggggggtgtgtctggggcggaggtgggggctggggccaggaccggggcccctctgagcagccttggggcaaaggatatgatgggggagggggtggctgccagcgggggaacaggggccctggcaggcaagacagtggaaacctcacttcttggtccctgtgggcacatccagggcctatcatccctgcccccaccacctctgcctcccaccagtttggcccctgttcgtccatcctcctttccttgatcttgaggtcaggggccaggtgtagggttggaacacctgctgggcctctggctccgtttcttgcggaactccagctcatccacggtccacacagcccccttctcgctctccacccgcacaaagcacttgtgcagactcaggttgtggcggatggcgttctgtggaaggccggggacagggagcaggtgggcgtcaacctctgaggccagcagccaccaccaacaacccacatcccgttcctccccaatgtgcctatgagcccagacccaggcctgcccactttgagctgcgatggcacttgaggccatcccagtcaccgccacctcagaggagctcaccttccaggtggcaggatggtttctgaagaaggcaaacatgcgtgtgaaccagtggtagatctcattgagtgtccgctgcttctctggagcctccaggatggcctggaagttggggggtggggtaaggggcacattccccaaacttggggtttagaggggctatgacctaccccgagccatctgacatgggggcggaattgtaggggcaggtaatcagggacaggactagatgtggggtgaagcatggggtcaaagatggggttagaaaaggggtgaagtgtcgggttgggcagggttagatgggtgtgggtatggttgttctgggattaggtaagggatcaggactgaggttgggagtggggtcttgttcagggctagggctgaagtgaggtgaaaggtctgggatggagttggagttggggttctctgtggaggtgacatttcagggttggggaaggtgaagggtcagaagtggggtcaaggatttggaaggggtaaagggccaggccaacttaagggtcagggaaggggtgggttaagagtcaggctggggtggactcaggtggggggtctaggggtgagggatgggatgacttggctttaggtcagaagccagagatggtttgaattatcgagtatcttacgtgtcagggacatggttaggtggttaggctcagggcaaggatgaggttagttgtggggttcggtgtggagtgaggctgagggtcagggaatttgatcagtttggattcaggaatgggattacagagtcagcgatgatgattgcagtgaggctatcagtcaggatggggctaggtcagggtttcagttcagagacagtcggggaatatctggtatcatgtaggggtgaggttcaggtttggggttaggtgtggcgctaggatgaaggttctgagaaggcattggggaggctgagatgaaggagttgggatggggtgatgaagttaaggatcaaatgggtgttacaaggaaaggttgggaatggtgcccagttgggggtgtattgacatactggggtacgttggggccagggaaggagatggggttgggttggcataaaggctggggaaggagttagagtaagagctggggtacgtttagggcaaggtgcagagatggggttagctttaggctattttatgggtccaggagagggttaggtatggggctgaggtggacatctggaaaggggtaggtttagggtcagaatttggcatgctctggcctggatggtggtttaggtttggatttgcggacaggtttggggtgaagccagcatgaggggtcacatttgaggcacggcttggggatccttggggctggggcttgggaatggaggaacccactctgagggcactcagagggagacaggagtttgggaggcaggtcccccaccccatctttgtcttcctcctccttggggccgagctgccctgcttacccagcggatgagcgtggcgtaggtgaaagggggtcgcatgttgtggaacttgaagtagtccatgttgtggaggaactctgtcagagggtggggatgaatcaagccccatgcaggacctcctagctagctccctgtcccctccccctacaaggtgagtctacaggcctgagatctcaccgtcaacacccgtgtccacgggcacaggtactgtttgctgagcacctgacataagttgtatcatttattctttgcaccacttctgccaaaatagttctccccgaggttgaaaagaagcggagtaacttgcacaccaaaggatgcaagaggttaaatggcagagccaggatgacagtcaaggtctctgatccctgctaagcccacaggccaggcctggtggagagcagtggataggtgagctcgggcgaatccaccccgattttccttggtcaggggaggaaaggaggtgctcctggaattacttagcagggtccctcccttctgatggccgaatatagtagctggagtccagagtgggtgaggcatggccccaatccccaagggagtcagggctaggggcccgacactcgagaccatatggggggctttcaggccacggacatcccgaaaggaagcttttgtgagcggatgcattttcccaaaggctgagtggcggcagctgcagtggtggtggtggtgggaaggggcagcatggagctcctttgcaccctccacccagagcctgtcaggattaggagcttgggggcaccgtgtagtgcaaggaccattcttacctgggaatgtgctgtttccatggctaccccacaggtgcctccggacagcaaacaggctgtcaggggcctcccgggggccagaccaggctgggacgacagggccttggctgccagcagctacgatgcagcaggagcccttgtcggatgatgcctgggtgagggggagaggctggtgacccagaggcttaaacttcccactttttactttctattttatgttttttattttttttgatactgagtcttgctctgtcgcccaggctggagtgcagtggtgcaatctcggctcactgcaacccccacctcccagattcaagcaagtcttctgcctcagcctcccgagtagctgggactacaggtgcccgtcactacgcccagctaatttttgtatttttggtagagatggggtttcaccatgttagccaggctggtctcgaactcctgacctcatgtgatccacccgcttcagcctcccaaagtgctgggattacaggcatgagccactgcgcctggctccactttatttttaaatcagtgtttttcaaagcaaggacgccctcttctaaattccagtctgaggtggaatcccacaaaacagcatgagccgtatttattagagcacaggtgcggatgtcgtatgtggccactgatgctgggaccatgaactggggttgaatagggctctttaccacccaactgtgaccttgggaaagtcacctaaacccccctggcctcaatattcctcatctgtacattcgcatcatgagaaataaattaccaccagcaaagcgctcagaaacagtgcctggcctccagggctggcttcatgggcgtgtgacctatgtggttatgtggcaccctgtgctttgtttaatgctctgtggtcgccatcttgaaatctgaacaaggggccctgcaggttacatagctggtcctgctggcacacagcctgcatctggcaagtctggctatttgcatttgctttaacaactcaggatcacagtgtttggggatcttagagtcagagggttttttttttttttttttcttgagacggagtcttgatctgtcgcctaggctggagtgcagtggtatgatctcagctcactgcaaactccgcctcccaggttcaagcaattctctgcctcagcctcccaagtagttgggactacagacacctgccaccacgcctggctaattttttgtacttttagtagacacagggtttcaccatcttggcgaggctggtcttgaactcctgacctcgtgatccacccgcctcggcctcccaaagtgctgggattacaggcgtgagccaccacgcccagccggggtcagagggtttgtaagtagaaggggacagatttccaggtctgggcatgtttggagctggggacaggggcccctagctctcaggacctgaatgtgaggttaggttccctgcaccgtgcagacctcctccctgccccccagcagtctgagtctgccaccaccagtcctggggtcgctcaccacagatgaagccttggtcagtgccattttcccagccaggtgggcctgcatggcactcagcttctccttctccagcaccagctgtgaaatggcacaaacatgaggcctcagcctggcccttctctgccacatctttgcccaggctacggtcttccctgggagtgcccgctcctcttccttcctttataccagccctcgtcccaggtgaacttggtttctggcacatggtggacagaaggttttgcgcactatccctatcccttaccctccaccgccctggcattacctgctgctccagagactgtaccatctctctctggaggagacattgtgccctgcccttctcatccagaagatggtccgcctggcagtgcctaagtagggagaagattccatgcaggtgaccacgacaggcctggtctggctcaatgctctgaatggggagggcccagaccctctgggagttctctcctctgagccccagctcccctcccctctctacctcagtctccctctcacacccctcgttcccttaacacatgcccctcagcacctactgcatgtcaggcctgaactcaccacttgagcctggccagagtgctggagataatgttggaagtgtggtgagttgagaatgggccagggaggtgagagtgggcaaagcattctgggtggagggacggcctgtgcaaaggcctggctgcaaggaggacaggacatgtggggttgctgctaagggttgtgtgtagtgtggtgtgtatttgtgtgtgtgtgtgtgtgagagagagagaaagagagagagagagagagagagagagagagagagagagagagagagagagacatatggggggactgaggggaggcagcagcagccatctagaggagctagaactttgggaacagtggaataaggctggcatgttggcatgaggagtagcagggcaaagcaggagtgcagattctagagcctggctacatgggttcaaatcccagctctgtcactcaggaactgggagattttgatcaagacacttaacctctttggcctcagtctccttgtctgtaaaatgggggtaaataacagcacaaacgtttcttattatacatacgagaaaactgaggtcgagagaagctaagtaatttgtccaaggtcacacagccagtcagggatggagctgggatttgaacccacagtctcagagtttagctcttgcatcttactacttattgggatgaagcctgagctgagatctgcaccctagacctctccccacaagccagggccggtagactggcacaggcctgggccactcacttgaggaagtcctctggctcttcgaagaccttctcacatccgggccacttgcagacaccatttgccagcagtgggtaggagctctggggcacagccgaaagggtgctggggggacagagggtgtcaggggaggggataggagggcgaggatccttcccagccctgtccactgacctgtccttcctgggtgcactgggatttgggaaggtgcagagcagtgccggctccctggacacccattccaggctggccacgttgatccctgtgggtggggacagggcacctatggaggctgtgggctgggctctggagcttggcccacaaggcctctcattttgagcttcccaccctcctgagcctcgaaaaccctgactcccagggggctctgctgtccccaaagtcccaggcttctggcagagaagcttaaagacggccattcgcaggtgctgacattttgactagctttgtaaagctctgtggttttgtgattttgacattctgcatctttaaggttctgcacctgacgttttttggagggtggagtttccaagcctctgagacctgacacctttgacccccagagtactgcaattcagaatagcctacactgctcacagccaaggatctggggacttgggggttctgtgaagccatggggtacgggctgaggtgttaccaggtgggaggccaggccgggccttgagggagaagaccccagtggcggtggtgggtggtgtgaggctgatcatggctgggctctccagggggtgcacctgcagcacaggggtccgggcgtgggcatccaccgttgagagctggggggcacatgtgggctgtggttcagcctgactcggggcccctccccacagttctcccacctgctccctcctccctgcccattcaccgtccatacctggtgcatgaaatgtggcctgtcctggaggagtgcctgtaagtggggcaaggggcccagccgtgccccggagggtgccaccatgactaggggcagtgtgggcagctgggcagaaaggcaggtgggtgagaggccatcctgatcctcactgttctgtgtctaattcaaatactctgcactgcaagcccacatggtagatgctatgatcatcccccttttacacgtatggaaactgaggctcatggagatcgagtaactttttaaagatcaaacagctaataagttgcagagctggcctcagccctgtcacctcacctacttggccccagtcctcttctcttgtcacatggggatggggacacatagctatgctcatgggactacaatacggcctcctcctctcctgagacagggattgggaggtcggggagagcctccaatctctgaggcctggcaggtggggattttcttggccctgcaacatctgcataagtcacagacttgcctgggacccagaaaccacttcctgtgccccagccagcccccctcccgcccagtgccacagtaaaggtcggcacctgtaggtccaggtaccccaccctgcctgccccatcctgggcccagggcctcacctgcagctgcgatggtggcatggggttcaaggaagaagaggaggcatgggccccgcctcgaagatctcggccctggaaggttccccctgggccccgggcccccagcaggtctgaggctttgggtgcagccctccagctgggcgaggctcctggggatgggccaagggccaaggaaggggccgagggcttgccaggcctggggttgggcatcgggtccttgtccaagggcaggctgcgtagacaataggggaaaggagtcacacgtgtgctagggcggtatgagatactcgaccacctgagccacgtggacactcctctggtcaaagcaggcattggctgggacatgtcccgaggggccccatagttgcaccccagctctagacacacacacacacacacacacacacacacaccaagaacacaggtacatgtacatacccacacatgccccacgtgcagaggtccagcacctggcttgcctgcccacgctagcacagccctggtgtggatgtgtcctctatgagggcaatggttgtttccccctccacttgagagctgtttcaagcctcaggcctctagccctccctgcaccctgcacaggctgtgtttgctcatcttgccggagctggtctcggactttctcctcggagtcctattttgccccagtgactaggcatggactcaaaagattcatctggctgctgtgagtggggctagtgaggaggctattgtaacagtcctggcaagtgatgatgctggcacagaatgggctggtggcagtggagaaggcgagaagtgggtagattctgagacttaatctgaagctggatcaggagcagtgctagcagcttggatgtagtgggcaagagggagagtcaaagtgacatgggttttagcttgagcagctggaaggaccgagctgacattacctgagatgggggacatggcggggagttggattgggtgcaaaagtgcaggtgtagatagacatgaagagtctggcattaaatatgtgagtggaggagctgagggggcagctgaatacgggggtctggatctcagggcaaggaggcgagtccaggagtgtgatcatgcacggatccagcatggcaagtgacagagaggaggagagatggggtctcttgagctggggcctgtagaagcttctctacccagcccccatcagagttcaccccaatttctggccctcaagcctggctcatgctacaccccctgcctcaaatgcccactccttctcctctttccctgtccaagccacgcaagacctgctcttctattgtcctcaccttgaaagccctccacaatggctccgggccccctgctgagccccagaaccttccactccctgagggaagcactggcttttcaggatcctataatcctggtctgagaggaagccagagctggaagggactgcccagccaaccccattatacagaaggggatgctcagatgccgagttccgtagtcccatagtgacttgagaactccacttctttctttaggaagtgtttccgtgtgcacattttataaactctctggtgtgtgtgtgtgtgtgtctccatctccccgttccacctcacagcactgagttgggcacacagctgctgagagcagcccgggggagtatagaagggttctgggggagcagttgctccttcctttctttgctgtcacctcctgggggtggttgtcagagctgtggtgctgagggagatgagtgtgagaatccaggtattaagttcttagtctcctgggggcttagaacattactgcgtgagaaacaggagtgtgggtctgtggaggctccgaacaagggcctgggagagcactggtgagatgagaaggtgagtgaatgaatgaagccagagatggggtgatgctccttcaagccaagaaataacaaagattgccagcaaccaccagaagctgggggagaggcctggagcagcttctcccttatggcccccagaaggaaccaaccctggcaacaccttgatcttggactctggcctccagaactgtgagatgatcaatttctgttgctgaagccactcagttgtggtactttgttatagcagccagaacaaactaataccgatttcggtgcaaatggatgttttccaccactctggcctggcccatgtggctggcctgtggtcacttctgaagctgcctggacacttggccagagctaagaattctccccaaacacatgtgggatggcctgactcagcaaagcatagatacattctcagacagggacatggagatgatctgtctgggggtagaggacctagagggccgggctgggcagccggcttcctgcactgtctgttgggacgtccctttctgactgggtttctcagaagctgaatgggggatgtttctgggacacagattatgttttcatatcggggtctgcatctgggccctgttgtcacagcccccgacttgcccagatttttccgccattgacgtcatggcggccggatgcgccgggcttcatcgacaccacggaggaagagaagagggcagataccccaccccacaggtttcgttccgagaactggctgccctgtcctgcagcaggcttggcccaggtggggtgacatgggtgctggtggatgtggtaggtgatgtccatctggccactatgacaagcccctagctctgaagacctggcccttcttgggttgtggagaggacccaggtttgaagctctgagagtgccaggcaggctccacagatactgggacccctggggtcttcaaatagtataacaccaggacctcagaatcatagaacagcatttcttagatttaaaggatcctagaatctcaaaaccacagactgtggggtctacggtcccaaagtctcagtatgtgtaggccagtgtccctggtgtccaaactccttggaaccatctgaaagtcaggcagcttgctgcttcatagggcctcttgcctaccaggcctggaaacagagccagcctccctagggcctcagtctccctgtccactctggaacaacgttcccaaatacatggccactccgccagagatggcaacagggggaggaggaggttgaggctggtgtgcctttggtctgggcctcatggggggagctggaaaagcctcagccttcgccaatacagagcccatcatcagactctctagaggggccccacaatcaaggttttcggggaccagcaccagctctggggacacacagcctgactgactgacatgcctccatcatcaccacgctctggccaactaggcctcctgacctatggagtccggggcctcacctagcccagctcttgtgaggctgggccccacactgtgatcgtggatcgtccaacctgtgggaagttggggtccaacgtgtgagaaggcagaagggggaatggtagcccaggttccccttcccccttctgggtgctgaggggtaaactgaggccttcagttggggagagagccagaaccagggtcccacctagagtcctgagatctaggcttggatttcaactctgccgctgcatttcggtgaggccctgagatctctggtcttcaatttgcccttctacactgagcacggagaggcgtggagtagacaagggccagggcccttctacgctgtctggttaagtcattaggtgtctgcagggcttcaagttgacaattgcccctctatccaggggactggctgagagatagggatacatagagacaaagagacacacacaaagagcgagcaagagagaacaagagatagtgagagacattgagagaaatggacacatgcatggagagccagagtgcatgtgtgcgagaggaggattgcctcaaataagaacatttgctggtctctggctggttcaactgatgctgcctgaaataatcaagaataaagaagggcaaggtgccagggacacccatggctgggtattgaattgtattgcaaagcaacaatcagcaaaacagtgtggccctggtataagaacagatactggggaagagaacagaatagaaagcttggacatggacccacatatggagagaactgaatttgtgatgaatgtggcatttcaaactggaggaccatggagtatggtttaacaaatgtgtctgagataattagggagaagataaagttattgagtgaatagtcagtccattatcccaacaacccctccctgcccagtttgaaatgtcaccatcatcatataccctaaaatgcccagatccattcaagatataagttttaacacctaatgctgatcttgggtttattgtgtgtcaggccttgtgctaagtatttactgtggttaaaaattttaatctaaacaaagactcctgaggaaggtactattataaccattgcagtacatatgaggaaatggaggtatggagaggttaagtgcctggctaaaaatcacacatagggcttggggtgacgctgggtttgtcccagacagtctggctccagtacccacactcttaacctctatagtaaatggaaaaaatgaagccataaaagagactagaagccaacataggtgaacatttatctcattttcaagtaggaaaggactttctaagcacaaaaccagagacagaagccacagaaaaaaagactaacctatttgactgtataaaaccatcataagcatcacaaaaaacaccataaacaaatagaaaaaaagcaaatgatgaattggggaaaatatttgctatatatgtaatggctgatgaaaggttaataaccattccaaataaagagctgtggcaaatcaataagggaaaaataagatgaacaccctattaggagtaaggacatgaccagacaaccaaaaaaaaaaaaaaaaaaaagcatgaatggccaatgaatagtaaaagtaatcacaagatgcaaatttcaacaatgtgataatgtgtttttcttacctgtcatgttgggaaataattaaaacataataatactcacctagggttagcttaagtagagggagcataaaataggacaaccttttggaaggagaattagcagagagggtcataaactttaaaaatgcacgccccctttgccccagcaactcccttttcaggaatccaaggaagcagtcagggatgtttatagaaaaaaacgagaaacaaccggaatgtccaacaatcggcacttggtcaaatcaatcaaagttcatgctgatgtgaggacagtcttgtccatcatgaaagatcatgtgttcaaacaatttttagtaagcttcaaaaacactactgttaattgaataaagcaggaacaaaaccaatatatagcatgattctaatttggttacagaaatactaatagctaacacttcgtgagcacttactttgtgccaaacgctgtgctaagcctgcagaatcgagctcaccccagccctgaacaacctgtttgcttcctgaatatggactctggtcacacacatgcagtcctggggtaggtccacacagctaaactacggttgacaatggtgtgaagtgctccctgcccccccgccccaagggtctcctctaaagcgatacaagcaaagttcagttaagtgctcagcttgccccggcaccttgcaatcctcctgctactagggtgaacagaactgatgctcactctcataaaatgtaaaggtcctcggcgacattactattattaaacgccagctgtgtacaaagctctaggctggatgctggctgggaaggcaggtgggggaaggcaagaaaagagagcgggagagatggaggaaaggagatcgatggagtgtggtcaagatggaggagacagagataggggagatggtcagaggccaggagagatgcggggaaagagagtctgagtgtagcgacagacagatggcgggagaaagagaggcagagaaacatgtaaaagagcaagacagggtgagcagagagacagagaaggatgagaggcatcaagagctaagagacaaagagatgagagagatgcagttgaaattttcagttgcacctggacagcatttcaagttgttcaaagctctgaaatccataaagactggcagctgacatattttaaaaatcctatccatctacgtatcaattgatgaattcatttatttttgcccctgcccatgcattaagtacttcacctttaagtcttctgccatttattctattattatttttttaaagaccttacctggctggaatcacggtagctgggtacatcccactgtaccagagggcccctgacccccccgccgtgcctacctccctgccatctcctccaatggggcccacatctggtaggggagagcagggacactcaccttggtgaagtggactgacagaaaaggatcagcc

SEQ ID NO: 1156 - DNA, 47 bp, Homo sapiens
acagaagccataagaatggaactccctataacttgtggcccccaagt

SEQ ID NO: 1157 - DNA, 49 bp, Homo sapiens
gaacatcgccaccagtcgaggggtcatcggccaccctgcctagcagttc

SEQ ID NO: 1158 - DNA, 39 bp, Homo sapiens
atgacatagtgtggaccaagggctttgccagtggggggt

SEQ ID NO: 1159 - DNA, 47 bp, Homo sapiens
atttaaactaagtcctggatgatgaataacagttatgtgcatatatg

SEQ ID NO: 1160 - DNA, 42 bp, Homo sapiens
gcaagcagataggataaatagggacaaagttagctgctgaag

SEQ ID NO: 1161 - DNA, 99 bp, Homo sapiens
gtgagaccccaaagggagagcgaaaggagtttactagatggaagcagcagaaggaacagcactcttgggagagggaacagtagaagcagagatgggggg

SEQ ID NO: 1162 - DNA, 47 bp, Homo sapiens
aagacttgaaggagatgagggagggagccagctagatatctgaggaa

SEQ ID NO: 1163 - DNA, 52 bp, Homo sapiens
aagagcaagacagggtgagcagagagacagagaaggatgagaggcatcaaga

SEQ ID NO: 1164 - DNA, 24 bp, Homo sapiens
agcaagagagaacaagagatagtg

SEQ ID NO: 1165 - DNA, 33 bp, Homo sapiens
agcagctggaaggaccgagctgacattacctga

SEQ ID NO: 1166 - DNA, 49 bp, Homo sapiens
acatacgagaaaactgaggtcgagagaagctaagtaatttgtccaaggt

SEQ ID NO: 1167 - DNA, 43 bp, Homo sapiens
gctacatgggttcaaatcccagctctgtcactcaggaactggg

SEQ ID NO: 1168 - DNA, 80 bp, Homo sapiens
gtgtggtgtgtatttgtgtgtgtgtgtgtgtgagagagagagaaagagagagagagagagagagagagagagagagagag

SEQ ID NO: 1169 - DNA, 53 bp, Homo sapiens
ggctgcagggctcgactggggggtgtgtctggggcggaggtgggggctggggc

SEQ ID NO: 1170 - DNA, 46 bp, Homo sapiens
gatcgagacagagctgggcaagaagaccctcagcaacctggagaag

SEQ ID NO: 1171 - DNA, 47 bp, Homo sapiens
ccagaccatcgaggacacaggcaccatcatgcgggaggttcgagacc

SEQ ID NO: 1172 - DNA, 47 bp, Homo sapiens
gatacccagggctggctttgtttcatggaggatgaagctagtggggt

SEQ ID NO: 1173 - DNA, 32 bp, Homo sapiens
ctatctgggaagctggaccggacgtttgcggt

SEQ ID NO: 1174 - DNA, 44 bp, Homo sapiens
tggtcctggggcagtgcctgctatatccctgcctagatgtcaga

SEQ ID NO: 1175 - DNA, 58306 bp, Homo sapiens
gggcaataacagtgttgtatgggagggtggcggtgggggtgcaaatgggacgtttgtgggccagagcctggcaacagatgaaatatttaccaaatatatacctgcagcaaacagtcaaactaaaataagaaaaacgatgtcattttccagtagtatatggaattcgaagtatataggaaaaacctaatatatgtgcaatatctctatggaaaaaagatcaaatattatcaattattattatttttagagacagggtcttgctctgtcacccaggctggagtgcagtggcgtgatcatagctcacagtagcgttgaattcctgtgctcaagtgatcctctgacctcagcctctgtagctgggactgcaggtgtgcactaccatgcccaactattttttttttaaattttgggttgcttcgaactttatttgagaacaacagaagataaacctatcaaaagaacacacaggtgggtgcgggggcacggctagtggcggcggccgggggcatccgggctaaggcttttacttggctgcagactggtcggatttcgcagctcctaggcccccaagctgggcccgtgactccaaggtgatctcgttggactgcgtggctagcttgggcatgggggcctccacggtcagtgtgccctcaggggacagggaggaggagaccttggtggggtccacaccggggggcagcgtgtatttccgggtgaagcatcgggagatgtagccatgctcgtcctgccgctcctcgtgcttgctggtgatctccaccatgccatccttggtcttgaccgtcagctcgtcggaggcgaagtagttgatgtccagggatacgcgccagcggtccgctgtgggccgattctccgagaccccgccgctgagctgccggctgagcgcgtagctgtaggcgggcgcggccaccgcggggctctcgaccgcggcgggggcaggggacgcacgtagcggggccagcagctggtgcccaaccactgcgaccagcccgaaggcctggtcaaagaggcgactgtgcgggtaccagtcgcggaaggggtcccagctggggtcccgcaggagcgagaaggggacgcggcgctcggtcatgctggctggctctgctggggacgtctgcttggacaagtgtcaatttttttttttttttttaagagatggtgtattgctgtattgcccatgccggtctcaaactcctgacctcaagcgatcctcccgccttggcctccaaaactgctgggattgcaggtgcgcgtcggctgttcaagaaatggttacatagatttcttttgctttatttatttatttagagacggagtctcgctctgttgcccaggctggagtgtaatggcgcaatctcagctcactgccaccttcgcttccccagttcaagtgattctcctgcctaagcctcccgagtagctgggactacaggcatgtgccaccatgcctggctaatttttctcattttagtagagagggggtttcaccatgttggccaggctggtctcgaactcctgacctcaggtgatccacccgactcggcctcccaaagtgctgggattacaggcgtgagccactgcacccagccggttacatagatatttgctgtgtaattattctttggagtgtacaaatgtgtatcatattaaagcatttattgaatgcatggacactagtaactataacttacatagtgctttcttatcttatgtgtcaggcacatagtacaacgtgctttatataaattaattctgttttaatcctaaaaagcaggtactgtcaatagtcccattttacagatgaggagactaagacacagggaagtagtcgctttgtgttaaaattctgcccttaatgtgtacacttttatagcctagaagatgaatgccgccttaaacgaatgagtcaggaagcccctttctgtccggcccctccactccccaccacacgggttgttcctttttcccttggaagagcccactggactgcaggtggaagaactacagttcccagcagctattgcaagctcaacctccgtgcacactcaccccaggcctcacatccggcatgcgccgtgctcgctcacagaactacactttccaactctccccacacgacccgtgacactctgtggaccgcgagcacggagcagggtttctacagctgctccccactttctcggacccggtcctggacccagcccccgactccgacacggctccaccatggaggaggcggaccgaatcctcatccattcgctgcgccaggccggcacgtaaggacagagcccccgcccacccccgaagcccacatccgggactctaaagcccaggaccccgtttcccgggaaccttaaaacccgggatcctgacattcagggctccaactccaggatcctaagaccctcacccccttacacacacacacacacacacacacacacacacgcacacacacacacgcacacacacaccgccctccctgacaccgacatcagaggcctcccaaatcctttaaccatgatatttggtacacccaaagctctgggacccagacaccttgagacgttacaaccttgaaacctcaagacccggaaccctgtaatctggggaatcttaacatcagttccctgagaccctgttatctggagaccctaagacacctgtgccctaagaaccagggagcgtaaaaccccaggaccctggcactcggggactccaaaaaatccctggaccagatacttgggatccttcaaactccagttccccaaacacctggggcttaaaaaaacccaggattctttttttttttttccttttccgagatggagtctcgctctgtcgcctaggctggagtgcagtggggtgatctcagctcactgcagcctccgcctcccaggttcaagtgattctcctgcctcagcctcccaagtagctggtattacagccgtgcgccaccttgcccggctaatttttgtatttttagcagagacagggtttcaccatgttggtcaggctggtctccaactcctgacctcaagtgatctgcccgcctccgcctcccaaagtgctgggattacaggtgtgagccaccacgcccagccaaaaaaacccagaattctaaaatctgacatcagcatttggtcaccctgacgcacgaagactcctccgttcagaggccctaaaaacccaggatgccaacatctagggagtctgatttttgtattgcttgaaactaggtggtcttgatattcagggatcttgatacccagggaccctgacatttggaacttctgaaaacagcagcctcctaaaatctagtcttctcaaaactctagcagctcaatatgtatgcaaagaacatactatctgggaaccaagaaacccagagattgtgccacctggaccctttcaccttcccagactcccaaattttgatatttttctaaactgagttctcttccacccaccattctcctactccaagatcttaggacttgaggatttccctagttcctggttttccaaatggaagtcacagtcaccaacatccaggatctgtctgaactgtaggcatcctccctgccccgaccctggtactagtgtttccaaaaggctgcagggctcagcctgatccctgttgcctgactattcctgtgatcaagctggtccccttcttcagggcagttcctccagatgtgcagaccttgcgcgccttcaccactgagctggttgtagaggctgtggtccgctgcctgcgtgtgatcaaccctgcggtgggctctggcctcagccctctgctgcctcttgccatgtctgcccggttccgcctggccatgagcctggctcaggcctgcatggtgagtggccctcctcctaatgcacacatcctctttcttcctcttttacaaagtaaccaagttcctttgcaacacttgcctttcctctgcaacacttgcctttcctctgcaacacttgcctttcctctgtcatttttcctgcggcttagttttcattagtggttaaggctgctgactgtactgccaaactgcctgagtagtttagatcctagccccaccacttggtaactgtgtgaccctaacccttctgggccccagttttcctatttgtgaaatggagatgataaatgtagtgcttttatgaggagcaaatgagtttatccagtttgcacctgggctgctcctggcttctatgttttaaatttagctgcaaaataccacccccaccccatagtatccatttcctagttccagaaaatactctgtctgggtcatatactcctaaactaatcactctgtgctctgattggcccagtctggatgacatggtcattccttttttttttttttttttgagatggagtctcactttgtcgcccaagctggagtgcagtggtgcgatcttggctcactgcaacctctgcctcccgggttcaagcaattctcctgcctcagcctcccgagtagctgggactacaggcgtgtgccaccacacccaactaattttcatgtttttagtagagacggggtttcaccatgttggccaggatggttttaatctcttgacctcatgatccacctgccttggcctcccaaagtgctgggattacaggagtgagccaccgtgcccagccttttcttttctttttttcttttttttttttttttgatgtgaagtctctctctgtcacccaagctggaatgcagtggcgtgatctcagctcacggctcactgcaacctccgtctcctgggttcaagtgattctcctgcctcagcctcccgagtagctgggactacaggcatgcaccaccatgctcagttaatttttgtatttttagtacagacggggtttcactatgttggctaggctggtcttgaactcctgacctcgtgatctgcccacctcggcctcccaaagtgctgagattacaggcgtgagccactgcgcccggccgacacggtcattcctataggacactgtgattagccactccttcaggatcctgtggagttgggataaggatgattacccaaagaaaggcatgctggttacccaaaagagtgtctgctatattacctctgtgggaaccacatatcctgcctctgctaagagcaattccaacaatgtctctgtgacagaataaataaagtgcttttcttttaaaaaatattttaatttttttagaggtaagtgtcttgctatattgcccaggctggtcttgaactcctggcctcaagagattctcctgcctctgcctcactagtagctaggactataggcacatgccaccctgcccgagaatttttaaatttttcgtagagatggggtctcgcttttgtagagatgttgcccaggctggtcttaagctcctggcctcaagcaatcttcccgccttggcctcctgagtagttgggactacaggcgtgcaccactgtgcctggtaaagagccattctgatgaaacactcacccattcccagtatagagctgagtccaggagtccagttcctgtattcaagagctgcaagtaatgccactccccctggctcactcactctgtgactttgggccagtcttttttttttttgaagcccaggctggagtgcagtggcacaatctcggcttactgcaacctcctccgcctcctgggttccagcaattctcctgcctcagcctgccgagtggctgggattacaggtgtctgccactgtgcccggctaatttttttgtatttttagtggagacagggtttcaccatcttggccaggctggtctcgaactcctgaccttgtgatccacccacctcagcctcccaaagtgttgggattacaggtgtgagccaccgcgtctggctctcttaacctttttgaggctaagtttccacatgtgtaaaatgggtataagaattgtagctactgtatagggttgctgtgaggattaaacatgagttaatgtgtgaaaagctggttataataagctttgcataaatgggattactattattggataggtccgatctggaacctgtgaatacatagtgaatggaaacactttgaactgacccaggaagtatatggtggtggagggacgatagagtaactaccgtgaaaactttcatttagatataggggactgggtggctagagttgttaaatttgggccttgcttatgcagtttctgtctcttagcaacaggtctcagagctccatccatcccttcgctctcaggttcacccagctctcaggagttgtcacattgttctctctggggctcttggtggccttatgaggcaggcagtctgtcccctggcccaggactgtatgtattcttaaggttagcacttaataggggggaagttatgtcttctgtttgcagaggagagtacacagcaggaggtgttgaggtgggggctcaggcttcctgcagttctctgttcttccctcagtgctgtctctcttggattttgttcacctgcttttgcttacattgattttagtgggggttagtgactatggcttttccagtggccaggaggtacatgtgggctgggcacgttggctcttgcatgtaatcccagcactttgggagtctgaggtgggaggatcagttgagcccaggagctcgagatcagcctgggcaacatagtgagacccccatctctacaaaaaataaaaaaaaaatagctgggcatggtggcacacgcctgtggtcccagctatgtgggaggctgaggtaggaggattgcttgagcctgggaggtccaggctgcagtgggctgtgattgcgccactgcactctagcttgggaaacagagtgaaaccccatctccaaaaaaaaaaaaaaaaaaaaagactggggacggtggctcctgtaattccagcactttgggaggtggaggcgggcagatctcaccagaggtcaggagtttgagaccagcctggccaacctggcgaaaccctgtctctactaaaaatacaaaaattagcctggtgtggtggtgtgtgcctgtaatcccagctactcaggaggctgaggcaggagaatcgcttgaacccaggaggcggaggttccagtgagtcgagattgcaccactgcactccagcctgagcgacagagcaagactcttgtttccaaaaaaataaaaaacaggtacatatggttgtctggcccccagcagccttggtttatcagcagcaggcaaaaggagttctcttaatccagctgtgtgctgtccctgtagcccccccgcaactcagcactgccatgttctggcatcttttcttcatatgccctgctcctggcaacagtttctgcaccttagccacctccatattttggcaccttccccactcctggaatgagtttctatatcagtcacagctctttgattgcatattgtggaaaaaatccaaagtaaaataccttaaaagccagtggttatacttatttgaccttgagcctccaaaataaatatatcttgcattgtgacccagtatactcctaagtatagaataatgatggcttctaagtgtactctgtgccaggccctgtggtaagtaacatggtgttaactcatttaattctcaggacaaccttctgctatatgtactgttggtataccctctttcagatgaagaaagtgaagcacagagggattaagtgatctgcctgaggtcgtatagttggtaagaggcaaagcttgggtttgaatccaggaagtctgctttcagagtctatgcagttccaaagcagtggcaactctggaagaaaaaggctttcctaggccgggtgtggtgattcccacctgtaatcccagcactttgggtggctgaggtgggcagattgcttgagcccaggagtttgagaccagcctggccaacatggtgtagccctgtctacactgaaaatacaaaaattagccgggtgtggtggcatgcacctgtaatcccagctactcgggaggctgcgtgggaggatcacttgagcccaggaggcagaggttccagtgagccaagatcacgctactgcactccagcctgagcgacagagcgagaccctgtctcaaaaaaaaaaaaaaaaaaaggaaaaaggctttctttctctcctggcctgtttcctcagtccccatcagaaccctcatgagtccttttgttctgagctattgtgcttctggtctttttgtcctgtttatttttaggcactctttctataataggtagatttgctctttacctatgatatgggctccaaatattttttcccaacttgtcattaacttttgactttgcttattctattttctttaaatattttctttcttttcatgtattcaaaagtacccatcttttcttttatggcctctggattttgagtcatagaaaggccagagctttaatcttgtttcttgttctctgtagcgttgactatcatcactctgtgactccccccagggcccagaggccttggggagctgggggaggttgggagggtggtggttagtgagaaagtgggagcgttttcagcctaggcccaagtctcccagggcaggaggaccctgcctgcttcctgatagccgcccaccaaccctcaggacctgggctatcccttggagcttggctatcagaacttcctctaccccagtgagcctgacctccgagacctgcttctcttcttggctgagcgtctgcccaccgatgcctctgaggatgcagaccagcctgcaggtactgggtgtctgggatgtgggcgggggcggtgaggggagaggagggccttctaggggctgtagggctgagagaggtagaggtggtaaaaaggttgatgggtaggggtggcggtatgtgccttcaggagagctaggcaggaggattaggcatcagagaggggctacagggcagggggcagggggctgaggttgagctgaccccggtggtgcgttggtgcggggaggggcctccctgactcaacccctgtgccctccctctctctcacttcgctctaaccacttgggcctcctgggtgctactcaaacataccccagtacactcccgcctctgcacctttgtatcgttggttacctttcccctaggtaccctcatggttcactcccttacctctttgaggttaacctcctctccgcagccctctcctgatccccacctggctgcagtctggatggtattcaggatcctattcatgatctctctcctctgctagcttgccggctccctgagggcagggacctttatccagtttgttccacgaagtagccctagtgtctagaacagcgacctgtacatagtaggtgctcggtgtttgttgaatgactgaacgtgagaacgcaagctggatagatgtgtatctctggatgggggtcaggagtggaggctggtctcctagggtatgcccttttggatttgcagcattgacatctgattcacttcctccctatcccccataggtgactcagctattctcctccgggccattgggagccaaattcgggaccagctggcactgccttgggtcccgccccaccttcgcactcccaagctgcagcacctccaggtgagacccctgactcccatggatcttctcttgtccccgtctgggtgcccagggttttggccccctacccctggcaaccctcatcccacttcaccctggagattctgagcctgctctcccaccagggctcggccctccagaagcctttccatgccagcaggctggtcgtgccagaattgagttccagaggtggtgagcatgaggctgtggggaggggtgaggaggaaggtgggggggaacctcatagcgttgccatgcggcagggccagctgactctgttcctgcctccagagccacgggagttccaggcgagtcccctgctgcttccagtccctacccaggtgcctcagcctgttggaagggtggcctcgctcctcgaacaccatgccctgcagctctgccagcagacgggccgggaccggccaggggatgaggactgggtccaccggacatcccgcctcccaccccaggtacagccagatgcctggctccctgctgtctgggctgctgctcactgacactcccgctggtcctctgctctccttccccactttgtccctcccttccattgtttcccctctgtgtgtgcttacctagctccccacctgaaagaacactggagtcagaaaaaaggagaacctgggacaagtcagtatccctcctcagagccttggtttcctgtgctaaaatttggggtagtaatagtgctctcctctcagggcagtagttagactgaataatgtgcttgagattcctggcaactggagcaatccagattggctacctgccttcatcattcattaattcattcattcatttggagtcttgctctgtcacccaggctggagtgcagtggcgtgatctcagcacactgcaacctccatctcccgggttcaagcgattctcctgcctcagcctcccaagtagctgggattacaggcttgcaccaccacacctggctaatttttatatttttagtagagacagggttttgccatgttggctaggctggtctcgaattcctgacctcaggtgatctgcccaccttggcctcccaaagtgttgggattacaggcatgagccaccgcacccggccctaatctttctctgtttctgcacttgtcactgatgttcatttttctggtttctaggtttttgcacaatttctgcctgtccccattattctagttctgtgtttttgctgctcctctttcttacctctctgtctcctcgtttctgtactgaattcctctcttgctctgtctatctatctgttcccccttctcctctgtctacttctttatctgtcccctcttcttctctgtgcacctttttatctgtgtccccttctgctctgtccacctctgtatctctccccttccttgctgtccacctatatatctgtcacccctctgcctctgtttacttcttaatctctctcctcttcctctctgtccacctctgtatctgttgccccttccctctgtccccttatctctcccttcttcctctctgtccacctctgtatttgtccctcctccccttctgtccatctctttatctgtcctctcttcttctttttttttgagacggtgtctcgctctgtcacccaggctggactacaatggcatgatcagggctcaaggcagcctcaaattcccgggctcaagcaatcttcccacctcaggcatctgagtagctgggtctacaggtgcgtgcgcccggctaatttttgtattttttgtagagatggggttttgccatgttgaccaggctggtctcgaactcctgacctgaagcaatccacccaccttggccttccaaagtgctgggattacaggcatgagccaccatgccgagccccctcttcttctctgtcaacctctttgtcccctcttcttctctatccatctctgtatctgtcccctcttcccctctgtccacttatctgtcccctcttcctctgtccacctctgcatctgtcccctccttctctctgtccacctctctgtcaccctctccctctgtccatttctttatctgtccccttttcctctctgtccacttctctttttccctccctccattctgctctcctatttctgttccctcttcctctgtgttcacccaggtatcagtacccctccccttctgtccacctttacatctgtcccctcttcctctctgtccacctctgtatttggcccccctccccttctgtctgcctctttatctgtctcctcttcctctgtgtccacatctctgtctgcccctctttttctccacctctgtgtcggccccctcctggtctgtccacttttttatctgtcctctctttctgtcttcacctctgtgtctttttacatttttatttttttatcattattattattttttgagatggagtctcgctctgtcacccaggctggagtacagtggtacgatctcagctcactgcaacctctgcctcctgggttcaagtgattctcctgcctcagcctcccacatagctaggactacaggcatgcaccaccacgcccagctaatttttgtatttttagtagagacagggtttcaccatgttggccaggatggtctcgatctcttgacctcatgatccatctgcctcggcctcccaaagtgttgtgattacaggcgtgagccaccacgcctggctgtctgtttttgtttttatatctgtagtaattttcaaacataaatgtagagagaatattctagtgaatcctatgtaccattttgccaacttttcttcatcttttctctcccaactttttctttgttgctgtattattttaaagcaaatctcagacatcatgtcatttcagctctaaatacttaggactacatctcttaactcataaggacattcagttttcaaggtaaccactggaccattttcatggctaatgaagttaacaataatatcttgtgggtttttttttgttttgttttgttttgttttttgtttttttttgttttgtttttgagacggagtctctctctgttgcccaggctggagtgcaatggcgtgatgtcgcttcactgcaacctccacttcctgggttcaagccattctcctgcctcagcccccaagtagctggaattacaggagcacactaagttttgtatttttagtagagtcggggttttaccatgttggccaggctggtcttgatctcctgacctcaggtgatctacctaccttggcctttcaaagggctaggattataggcatgagccactgtacccggccaacaatgatatcttaataccatccaatacttgagttcataatcagattttcccattatcttgaaactctgttgtccctctcttgcctctctctctctgcctctttctgtgcttggtacctttgattccctgtctctgccctgtcccccgatatcctgtctatgcttctcttggatttgggggctctaggcccacccccctctcttcccacatccttctccagcatggggatctagtgggtggagagaagtatgtctgtgagcaagaggagacccctgtcctcgaggagatcccaggctggtggagcaggagagtagagcagggcctgccttagtgggaaggctggagggtgggggtgacttgtctgtatactcttgtcagggggtccttggaggaggcagggccttgggtgctaggtgggcccctacaccttcctgcttcccccgccttttctccccaggaggacacacgggctcagcggcagcggctgcagaagcaactgactgagcatctgcgccaaagctggggcctgcttggggcccccatacaagcccgggacctgggagaactgctgcaggcctggggtgctggggccaagactggtgctcctaagggctcccgcttcacgcactcagagaagttcaccttccatctggtgggtgcgcctgaggacatgagatgtgtggatgggcgtggcaggcttggagggtggctttttgtgtcagcaccacacctttatccacacaggttcctgtgttcccactggacaggccctcgccccactgtgggatgggtacccagaggggtcccctagcttattagggacttgactggagaaaatgtggataggtgggaaccatgcaaaggtgtgggggtgttcttggggcaacaccccctttcctcaggcagtttcctttgagcatatcttctgtcctaagatgttcactctgagggccccccatccttctcatgggcatttgaggcttgagagatggggcaggtgggtaggagctgtgacagggtcagggagatttctccacgagcaagcactctggcccgaggttgcagatggtgcctttacccacatagtcacagtctggccaccatcggtgcttcagtgggcatgcatgccgcactgggggcagttctcaggggaggctgaggctgggccacgtgaggaagggccttccctggcagccaggatgcccctcgtcactccccttaggagccccaggcccaggccactcaggtgtcagatgtgccagccacctcccggcggcctgaacaggtgagcagagtggtttggaggggggtgtcccaggcccttgcttgtctactgggcctgacaccccaaccctgactggcctgggcctcccaggtcacgtgggcagctcaggaacaggagctcgagtcccttcgggagcagctggaaggagtgaaccgcagcattgaggaggttgaggccgacatgaagaccctgggcgtcagctttgtgcaggtaaggggcggaggaggggctgcgcgttgggctaggtcagaaggagggcctcggggtgtgagggactagatggggcaagaggtgctctgtagaggtctgcacatggcagaagggttcctgggagccattagggatctgtgggcctcttgagggtggctatgagaatcaggccagggtgagggtctgtgggcatctatggggcaccgcgggtctgcatgggcaggggattgaggggtcctcggagggtctgtgggcatctgtggggtacccacgggtctgcatggacaggggattagggggtcctcggggtccttggcaccagcgtggagctgttagagaggcctgtgggggccacaggggtgtacagtcatctgtggagctccatgggggctgtggcatgtgactgggtatccaccggccaggcagagtctgagtgccggcacagcaagctcagtacagcagagcgtgagcaggccctgcgcctgaagagccgcgcggtggagctgctgcccgatgggactgccaaccttgccaagctgcaggtggggttggggctgtagctgggcggagaggggcagggtggggtggggtggggttggagggcccagcctgtgtgacatgtacccatcccccaccagcttgtggtggagaatagtgcccagcgggtcatccacttggcgggtcagtgggagaagcaccgggtcccactcctcgctgagtaccgccacctccgaaagctgcaggattgcagagaggtaagcagtggggccctgggctgtgggcgggccagggcaggctcggtccctctctagggggccatccctatgctctgctcactgtcttctgcctgtgggctcatggcagctggaatcttctcgacggctggcagagatccaagaactgcaccagagtgtccgggcggctgctgaagaggcccgcaggaaggaggaggtctataagcagctggtaaggcctgtgtgagggacctgggtagcttaggagggtggggggatggtcctggggcagtgcctgctatatccctgcctagatgtcagagctggagactctgcccagagatgtgtcccggctggcctacacccagcgcatcctggagatcgtgggcaacatccggaagcagaaggaagagatcaccaaggtacactgccagggccatggagggtgggtcatgtgggctgtcaggcatagtgtggccgcacagggacctcacaccctcaggcagagctgtccagtcacactctaacacagaatagtcacacacaatccatcccagtcacccctgacacagtgacacagtccctgtctggtacacatgaggaccctccactgctagccagcctgccccaggcaggggctcatggctgccatggtgtctgccagatcttgtctgatacgaaggagcttcagaaggaaatcaactccctatctgggaagctggaccggacgtttgcggtgactgatgagcttgtgttcaaggtgtggggcaggttgggcgggggtgagtggggtgaggctgggctgctgccttgtgcatctgctaattggctggctggggtccagacccaggccctgtgcgaggctggaggtgcactgatacccagggctggctttgtttcatggaggatgaagctagtggggtggtgggagagggtggccttcttagggcatggagatggtcaagggcagcccactgatacctttgaggtccctgtgtctggtcaggatgccaagaaggacgatgctgttcggaaggcctataagtatctagctgctctgcacgaggtgaggggagacatgtgcctggggtggggctgctgggggtgggtgggactgggtgcaagccttctgctcctgttgtccccagaactgcagccagctcatccagaccatcgaggacacaggcaccatcatgcgggaggttcgagacctcgaggagcaggtgaggcctgggggcaggatggggagccaaggcgggccggggggacagttcctcaggttatgctgacagaggctgtggagccacacacagccgatggctggacacccagccctgccccttagtgcctgtgacctgggacaggcaagtggcctactgtgagccccagcttccaccccaagggccctcctgtctgcctcccagggccatgggcagaggcttcagcttaaagatgtagggggaatcctgccacatggcgaaggatgctttgggtagagggaacaccacacgaggcctggccatgggacagagcaggctgttggagttggtgggaggggcccagagtggctgtgatgggggctggtgagcaggagctgggaaaggggctgtgtgtgctgagggggcatgtgttcacattgcctcagatcgagacagagctgggcaagaagaccctcagcaacctggagaagatccgggaggactaccgagccctccgccaggagaacgctggcctcctaggccgggtccgggaggcctgaggagccgccggcagaggtctctccccagcctcaggcagggatttggggtgctggaggcagtggccaagcacatgccctagctacttcctccgctgtccagttcctcctgctgcggccttggacccagacccctgcccactgaccgcaacccttatatggggtgatagtccagcatgtggggagctcggctgcagtttattggggacggtactgtgggttgggggccttggatcccaaataaatgagtagttcctctgcagtctaagctgaggcatggatcagggctcagggaatgggagtgaggtgagtggcaggggagacacggggtatttttggcaaggcagtgtgtgtggctgtgtgtgtctgcacgggactcaagagacccactggggggctgtgcgtgtgcatatgcgtgagatacacaggtgaattctaacaggccgtgtgtgtgagcgagcacgtgttgggacctcagatcctgagggtactgacgctgcttctgtgtaggcctctgggcacacccctgtgttgacagtgcccctgtgggccctgaggctggctgtgggtgcgtgccttggggtgtgtgggttgtcagggctgtgcttgtgtgtgattgtgtgatgatgcagctttgaggttgtttgagtgtactgaggcaggctctctgtgttttggggtttgtgttgagtgagggacaggattgtgacattttgtgtgtctgtgtgacttttccagccctgaagtaatctgtgcgagcagctgaggcaggctctgtgtggctggttgtgaaggctctgtttggctgcagggctcgactggggggtgtgtctggggcggaggtgggggctggggccaggaccggggcccctctgagcagccttggggcaaaggatatgatgggggagggggtggctgccagcgggggaacaggggccctggcaggcaagacagtggaaacctcacttcttggtccctgtgggcacatccagggcctatcatccctgcccccaccacctctgcctcccaccagtttggcccctgttcgtccatcctcctttccttgatcttgaggtcaggggccaggtgtagggttggaacacctgctgggcctctggctccgtttcttgcggaactccagctcatccacggtccacacagcccccttctcgctctccacccgcacaaagcacttgtgcagactcaggttgtggcggatggcgttctgtggaaggccggggacagggagcaggtgggcgtcaacctctgaggccagcagccaccaccaacaacccacatcccgttcctccccaatgtgcctatgagcccagacccaggcctgcccactttgagctgcgatggcacttgaggccatcccagtcaccgccacctcagaggagctcaccttccaggtggcaggatggtttctgaagaaggcaaacatgcgtgtgaaccagtggtagatctcattgagtgtccgctgcttctctggagcctccaggatggcctggaagttggggggtggggtaaggggcacattccccaaacttggggtttagaggggctatgacctaccccgagccatctgacatgggggcggaattgtaggggcaggtaatcagggacaggactagatgtggggtgaagcatggggtcaaagatggggttagaaaaggggtgaagtgtcgggttgggcagggttagatgggtgtgggtatggttgttctgggattaggtaagggatcaggactgaggttgggagtggggtcttgttcagggctagggctgaagtgaggtgaaaggtctgggatggagttggagttggggttctctgtggaggtgacatttcagggttggggaaggtgaagggtcagaagtggggtcaaggatttggaaggggtaaagggccaggccaacttaagggtcagggaaggggtgggttaagagtcaggctggggtggactcaggtggggggtctaggggtgagggatgggatgacttggctttaggtcagaagccagagatggtttgaattatcgagtatcttacgtgtcagggacatggttaggtggttaggctcagggcaaggatgaggttagttgtggggttcggtgtggagtgaggctgagggtcagggaatttgatcagtttggattcaggaatgggattacagagtcagcgatgatgattgcagtgaggctatcagtcaggatggggctaggtcagggtttcagttcagagacagtcggggaatatctggtatcatgtaggggtgaggttcaggtttggggttaggtgtggcgctaggatgaaggttctgagaaggcattggggaggctgagatgaaggagttgggatggggtgatgaagttaaggatcaaatgggtgttacaaggaaaggttgggaatggtgcccagttgggggtgtattgacatactggggtacgttggggccagggaaggagatggggttgggttggcataaaggctggggaaggagttagagtaagagctggggtacgtttagggcaaggtgcagagatggggttagctttaggctattttatgggtccaggagagggttaggtatggggctgaggtggacatctggaaaggggtaggtttagggtcagaatttggcatgctctggcctggatggtggtttaggtttggatttgcggacaggtttggggtgaagccagcatgaggggtcacatttgaggcacggcttggggatccttggggctggggcttgggaatggaggaacccactctgagggcactcagagggagacaggagtttgggaggcaggtcccccaccccatctttgtcttcctcctccttggggccgagctgccctgcttacccagcggatgagcgtggcgtaggtgaaagggggtcgcatgttgtggaacttgaagtagtccatgttgtggaggaactctgtcagagggtggggatgaatcaagccccatgcaggacctcctagctagctccctgtcccctccccctacaaggtgagtctacaggcctgagatctcaccgtcaacacccgtgtccacgggcacaggtactgtttgctgagcacctgacataagttgtatcatttattctttgcaccacttctgccaaaatagttctccccgaggttgaaaagaagcggagtaacttgcacaccaaaggatgcaagaggttaaatggcagagccaggatgacagtcaaggtctctgatccctgctaagcccacaggccaggcctggtggagagcagtggataggtgagctcgggcgaatccaccccgattttccttggtcaggggaggaaaggaggtgctcctggaattacttagcagggtccctcccttctgatggccgaatatagtagctggagtccagagtgggtgaggcatggccccaatccccaagggagtcagggctaggggcccgacactcgagaccatatggggggctttcaggccacggacatcccgaaaggaagcttttgtgagcggatgcattttcccaaaggctgagtggcggcagctgcagtggtggtggtggtgggaaggggcagcatggagctcctttgcaccctccacccagagcctgtcaggattaggagcttgggggcaccgtgtagtgcaaggaccattcttacctgggaatgtgctgtttccatggctaccccacaggtgcctccggacagcaaacaggctgtcaggggcctcccgggggccagaccaggctgggacgacagggccttggctgccagcagctacgatgcagcaggagcccttgtcggatgatgcctgggtgagggggagaggctggtgacccagaggcttaaacttcccactttttactttctattttatgttttttattttttttgatactgagtcttgctctgtcgcccaggctggagtgcagtggtgcaatctcggctcactgcaacccccacctcccagattcaagcaagtcttctgcctcagcctcccgagtagctgggactacaggtgcccgtcactacgcccagctaatttttgtatttttggtagagatggggtttcaccatgttagccaggctggtctcgaactcctgacctcatgtgatccacccgcttcagcctcccaaagtgctgggattacaggcatgagccactgcgcctggctccactttatttttaaatcagtgtttttcaaagcaaggacgccctcttctaaattccagtctgaggtggaatcccacaaaacagcatgagccgtatttattagagcacaggtgcggatgtcgtatgtggccactgatgctgggaccatgaactggggttgaatagggctctttaccacccaactgtgaccttgggaaagtcacctaaacccccctggcctcaatattcctcatctgtacattcgcatcatgagaaataaattaccaccagcaaagcgctcagaaacagtgcctggcctccagggctggcttcatgggcgtgtgacctatgtggttatgtggcaccctgtgctttgtttaatgctctgtggtcgccatcttgaaatctgaacaaggggccctgcaggttacatagctggtcctgctggcacacagcctgcatctggcaagtctggctatttgcatttgctttaacaactcaggatcacagtgtttggggatcttagagtcagagggttttttttttttttttttcttgagacggagtcttgatctgtcgcctaggctggagtgcagtggtatgatctcagctcactgcaaactccgcctcccaggttcaagcaattctctgcctcagcctcccaagtagttgggactacagacacctgccaccacgcctggctaattttttgtacttttagtagacacagggtttcaccatcttggcgaggctggtcttgaactcctgacctcgtgatccacccgcctcggcctcccaaagtgctgggattacaggcgtgagccaccacgcccagccggggtcagagggtttgtaagtagaaggggacagatttccaggtctgggcatgtttggagctggggacaggggcccctagctctcaggacctgaatgtgaggttaggttccctgcaccgtgcagacctcctccctgccccccagcagtctgagtctgccaccaccagtcctggggtcgctcaccacagatgaagccttggtcagtgccattttcccagccaggtgggcctgcatggcactcagcttctccttctccagcaccagctgtgaaatggcacaaacatgaggcctcagcctggcccttctctgccacatctttgcccaggctacggtcttccctgggagtgcccgctcctcttccttcctttataccagccctcgtcccaggtgaacttggtttctggcacatggtggacagaaggttttgcgcactatccctatcccttaccctccaccgccctggcattacctgctgctccagagactgtaccatctctctctggaggagacattgtgccctgcccttctcatccagaagatggtccgcctggcagtgcctaagtagggagaagattccatgcaggtgaccacgacaggcctggtctggctcaatgctctgaatggggagggcccagaccctctgggagttctctcctctgagccccagctcccctcccctctctacctcagtctccctctcacacccctcgttcccttaacacatgcccctcagcacctactgcatgtcaggcctgaactcaccacttgagcctggccagagtgctggagataatgttggaagtgtggtgagttgagaatgggccagggaggtgagagtgggcaaagcattctgggtggagggacggcctgtgcaaaggcctggctgcaaggaggacaggacatgtggggttgctgctaagggttgtgtgtagtgtggtgtgtatttgtgtgtgtgtgtgtgtgagagagagagaaagagagagagagagagagagagagagagagagagagagagagagagagagacatatggggggactgaggggaggcagcagcagccatctagaggagctagaactttgggaacagtggaataaggctggcatgttggcatgaggagtagcagggcaaagcaggagtgcagattctagagcctggctacatgggttcaaatcccagctctgtcactcaggaactgggagattttgatcaagacacttaacctctttggcctcagtctccttgtctgtaaaatgggggtaaataacagcacaaacgtttcttattatacatacgagaaaactgaggtcgagagaagctaagtaatttgtccaaggtcacacagccagtcagggatggagctgggatttgaacccacagtctcagagtttagctcttgcatcttactacttattgggatgaagcctgagctgagatctgcaccctagacctctccccacaagccagggccggtagactggcacaggcctgggccactcacttgaggaagtcctctggctcttcgaagaccttctcacatccgggccacttgcagacaccatttgccagcagtgggtaggagctctggggcacagccgaaagggtgctggggggacagagggtgtcaggggaggggataggagggcgaggatccttcccagccctgtccactgacctgtccttcctgggtgcactgggatttgggaaggtgcagagcagtgccggctccctggacacccattccaggctggccacgttgatccctgtgggtggggacagggcacctatggaggctgtgggctgggctctggagcttggcccacaaggcctctcattttgagcttcccaccctcctgagcctcgaaaaccctgactcccagggggctctgctgtccccaaagtcccaggcttctggcagagaagcttaaagacggccattcgcaggtgctgacattttgactagctttgtaaagctctgtggttttgtgattttgacattctgcatctttaaggttctgcacctgacgttttttggagggtggagtttccaagcctctgagacctgacacctttgacccccagagtactgcaattcagaatagcctacactgctcacagccaaggatctggggacttgggggttctgtgaagccatggggtacgggctgaggtgttaccaggtgggaggccaggccgggccttgagggagaagaccccagtggcggtggtgggtggtgtgaggctgatcatggctgggctctccagggggtgcacctgcagcacaggggtccgggcgtgggcatccaccgttgagagctggggggcacatgtgggctgtggttcagcctgactcggggcccctccccacagttctcccacctgctccctcctccctgcccattcaccgtccatacctggtgcatgaaatgtggcctgtcctggaggagtgcctgtaagtggggcaaggggcccagccgtgccccggagggtgccaccatgactaggggcagtgtgggcagctgggcagaaaggcaggtgggtgagaggccatcctgatcctcactgttctgtgtctaattcaaatactctgcactgcaagcccacatggtagatgctatgatcatcccccttttacacgtatggaaactgaggctcatggagatcgagtaactttttaaagatcaaacagctaataagttgcagagctggcctcagccctgtcacctcacctacttggccccagtcctcttctcttgtcacatggggatggggacacatagctatgctcatgggactacaatacggcctcctcctctcctgagacagggattgggaggtcggggagagcctccaatctctgaggcctggcaggtggggattttcttggccctgcaacatctgcataagtcacagacttgcctgggacccagaaaccacttcctgtgccccagccagcccccctcccgcccagtgccacagtaaaggtcggcacctgtaggtccaggtaccccaccctgcctgccccatcctgggcccagggcctcacctgcagctgcgatggtggcatggggttcaaggaagaagaggaggcatgggccccgcctcgaagatctcggccctggaaggttccccctgggccccgggcccccagcaggtctgaggctttgggtgcagccctccagctgggcgaggctcctggggatgggccaagggccaaggaaggggccgagggcttgccaggcctggggttgggcatcgggtccttgtccaagggcaggctgcgtagacaataggggaaaggagtcacacgtgtgctagggcggtatgagatactcgaccacctgagccacgtggacactcctctggtcaaagcaggcattggctgggacatgtcccgaggggccccatagttgcaccccagctctagacacacacacacacacacacacacacacacaccaagaacacaggtacatgtacatacccacacatgccccacgtgcagaggtccagcacctggcttgcctgcccacgctagcacagccctggtgtggatgtgtcctctatgagggcaatggttgtttccccctccacttgagagctgtttcaagcctcaggcctctagccctccctgcaccctgcacaggctgtgtttgctcatcttgccggagctggtctcggactttctcctcggagtcctattttgccccagtgactaggcatggactcaaaagattcatctggctgctgtgagtggggctagtgaggaggctattgtaacagtcctggcaagtgatgatgctggcacagaatgggctggtggcagtggagaaggcgagaagtgggtagattctgagacttaatctgaagctggatcaggagcagtgctagcagcttggatgtagtgggcaagagggagagtcaaagtgacatgggttttagcttgagcagctggaaggaccgagctgacattacctgagatgggggacatggcggggagttggattgggtgcaaaagtgcaggtgtagatagacatgaagagtctggcattaaatatgtgagtggaggagctgagggggcagctgaatacgggggtctggatctcagggcaaggaggcgagtccaggagtgtgatcatgcacggatccagcatggcaagtgacagagaggaggagagatggggtctcttgagctggggcctgtagaagcttctctacccagcccccatcagagttcaccccaatttctggccctcaagcctggctcatgctacaccccctgcctcaaatgcccactccttctcctctttccctgtccaagccacgcaagacctgctcttctattgtcctcaccttgaaagccctccacaatggctccgggccccctgctgagccccagaaccttccactccctgagggaagcactggcttttcaggatcctataatcctggtctgagaggaagccagagctggaagggactgcccagccaaccccattatacagaaggggatgctcagatgccgagttccgtagtcccatagtgacttgagaactccacttctttctttaggaagtgtttccgtgtgcacattttataaactctctggtgtgtgtgtgtgtgtgtctccatctccccgttccacctcacagcactgagttgggcacacagctgctgagagcagcccgggggagtatagaagggttctgggggagcagttgctccttcctttctttgctgtcacctcctgggggtggttgtcagagctgtggtgctgagggagatgagtgtgagaatccaggtattaagttcttagtctcctgggggcttagaacattactgcgtgagaaacaggagtgtgggtctgtggaggctccgaacaagggcctgggagagcactggtgagatgagaaggtgagtgaatgaatgaagccagagatggggtgatgctccttcaagccaagaaataacaaagattgccagcaaccaccagaagctgggggagaggcctggagcagcttctcccttatggcccccagaaggaaccaaccctggcaacaccttgatcttggactctggcctccagaactgtgagatgatcaatttctgttgctgaagccactcagttgtggtactttgttatagcagccagaacaaactaataccgatttcggtgcaaatggatgttttccaccactctggcctggcccatgtggctggcctgtggtcacttctgaagctgcctggacacttggccagagctaagaattctccccaaacacatgtgggatggcctgactcagcaaagcatagatacattctcagacagggacatggagatgatctgtctgggggtagaggacctagagggccgggctgggcagccggcttcctgcactgtctgttgggacgtccctttctgactgggtttctcagaagctgaatgggggatgtttctgggacacagattatgttttcatatcggggtctgcatctgggccctgttgtcacagcccccgacttgcccagatttttccgccattgacgtcatggcggccggatgcgccgggcttcatcgacaccacggaggaagagaagagggcagataccccaccccacaggtttcgttccgagaactggctgccctgtcctgcagcaggcttggcccaggtggggtgacatgggtgctggtggatgtggtaggtgatgtccatctggccactatgacaagcccctagctctgaagacctggcccttcttgggttgtggagaggacccaggtttgaagctctgagagtgccaggcaggctccacagatactgggacccctggggtcttcaaatagtataacaccaggacctcagaatcatagaacagcatttcttagatttaaaggatcctagaatctcaaaaccacagactgtggggtctacggtcccaaagtctcagtatgtgtaggccagtgtccctggtgtccaaactccttggaaccatctgaaagtcaggcagcttgctgcttcatagggcctcttgcctaccaggcctggaaacagagccagcctccctagggcctcagtctccctgtccactctggaacaacgttcccaaatacatggccactccgccagagatggcaacagggggaggaggaggttgaggctggtgtgcctttggtctgggcctcatggggggagctggaaaagcctcagccttcgccaatacagagcccatcatcagactctctagaggggccccacaatcaaggttttcggggaccagcaccagctctggggacacacagcctgactgactgacatgcctccatcatcaccacgctctggccaactaggcctcctgacctatggagtccggggcctcacctagcccagctcttgtgaggctgggccccacactgtgatcgtggatcgtccaacctgtgggaagttggggtccaacgtgtgagaaggcagaagggggaatggtagcccaggttccccttcccccttctgggtgctgaggggtaaactgaggccttcagttggggagagagccagaaccagggtcccacctagagtcctgagatctaggcttggatttcaactctgccgctgcatttcggtgaggccctgagatctctggtcttcaatttgcccttctacactgagcacggagaggcgtggagtagacaagggccagggcccttctacgctgtctggttaagtcattaggtgtctgcagggcttcaagttgacaattgcccctctatccaggggactggctgagagatagggatacatagagacaaagagacacacacaaagagcgagcaagagagaacaagagatagtgagagacattgagagaaatggacacatgcatggagagccagagtgcatgtgtgcgagaggaggattgcctcaaataagaacatttgctggtctctggctggttcaactgatgctgcctgaaataatcaagaataaagaagggcaaggtgccagggacacccatggctgggtattgaattgtattgcaaagcaacaatcagcaaaacagtgtggccctggtataagaacagatactggggaagagaacagaatagaaagcttggacatggacccacatatggagagaactgaatttgtgatgaatgtggcatttcaaactggaggaccatggagtatggtttaacaaatgtgtctgagataattagggagaagataaagttattgagtgaatagtcagtccattatcccaacaacccctccctgcccagtttgaaatgtcaccatcatcatataccctaaaatgcccagatccattcaagatataagttttaacacctaatgctgatcttgggtttattgtgtgtcaggccttgtgctaagtatttactgtggttaaaaattttaatctaaacaaagactcctgaggaaggtactattataaccattgcagtacatatgaggaaatggaggtatggagaggttaagtgcctggctaaaaatcacacatagggcttggggtgacgctgggtttgtcccagacagtctggctccagtacccacactcttaacctctatagtaaatggaaaaaatgaagccataaaagagactagaagccaacataggtgaacatttatctcattttcaagtaggaaaggactttctaagcacaaaaccagagacagaagccacagaaaaaaagactaacctatttgactgtataaaaccatcataagcatcacaaaaaacaccataaacaaatagaaaaaaagcaaatgatgaattggggaaaatatttgctatatatgtaatggctgatgaaaggttaataaccattccaaataaagagctgtggcaaatcaataagggaaaaataagatgaacaccctattaggagtaaggacatgaccagacaaccaaaaaaaaaaaaaaaaaaaagcatgaatggccaatgaatagtaaaagtaatcacaagatgcaaatttcaacaatgtgataatgtgtttttcttacctgtcatgttgggaaataattaaaacataataatactcacctagggttagcttaagtagagggagcataaaataggacaaccttttggaaggagaattagcagagagggtcataaactttaaaaatgcacgccccctttgccccagcaactcccttttcaggaatccaaggaagcagtcagggatgtttatagaaaaaaacgagaaacaaccggaatgtccaacaatcggcacttggtcaaatcaatcaaagttcatgctgatgtgaggacagtcttgtccatcatgaaagatcatgtgttcaaacaatttttagtaagcttcaaaaacactactgttaattgaataaagcaggaacaaaaccaatatatagcatgattctaatttggttacagaaatactaatagctaacacttcgtgagcacttactttgtgccaaacgctgtgctaagcctgcagaatcgagctcaccccagccctgaacaacctgtttgcttcctgaatatggactctggtcacacacatgcagtcctggggtaggtccacacagctaaactacggttgacaatggtgtgaagtgctccctgcccccccgccccaagggtctcctctaaagcgatacaagcaaagttcagttaagtgctcagcttgccccggcaccttgcaatcctcctgctactagggtgaacagaactgatgctcactctcataaaatgtaaaggtcctcggcgacattactattattaaacgccagctgtgtacaaagctctaggctggatgctggctgggaaggcaggtgggggaaggcaagaaaagagagcgggagagatggaggaaaggagatcgatggagtgtggtcaagatggaggagacagagataggggagatggtcagaggccaggagagatgcggggaaagagagtctgagtgtagcgacagacagatggcgggagaaagagaggcagagaaacatgtaaaagagcaagacagggtgagcagagagacagagaaggatgagaggcatcaagagctaagagacaaagagatgagagagatgcagttgaaattttcagttgcacctggacagcatttcaagttgttcaaagctctgaaatccataaagactggcagctgacatattttaaaaatcctatccatctacgtatcaattgatgaattcatttatttttgcccctgcccatgcattaagtacttcacctttaagtcttctgccatttattctattattatttttttaaagaccttacctggctggaatcacggtagctgggtacatcccactgtaccagagggcccctgacccccccgccgtgcctacctccctgccatctcctccaatggggcccacatctggtaggggagagcagggacactcaccttggtgaagtggactgacagaaaaggatcagcctggcttgtgggaaactgtcacgtatcaaaaacaactttgcttttataccgagaagaaaaaccacgctgtacggtgtggaagccgcagacctctctcttctaataatccaaatttttttcgatgagtgtgtgcgctgataatcacggggtgggggggggttctcatagttttttttttctctctctctgtgtttctccttttcttgattatgagacttaaacggaaattttgaaattttgggtttttttctttgccctttacgagtcatctgaaaatatgatttcttcccctcaccacagaggtgagaggtatcaatgagataatagggctcatgagaaaccacagtttttaaaacaaaagtgtatagagtttgaaaaaaaaaaaacaagggaaaagaactaaaataaatcacagggccaacccgaggcaggcagagacaccattctgtgagtgagaggatatttgagggtctctggggaaagaaagagaatctgaagctctatgtgtggatgggaaatgccagggaaagagacagaatagggctgggttcccagaggcctcgccctactccaggcctcagtttccctatagatggaattgatatggtccccattgcttgaactacccggcgaggggagttctgcaccccctgcaacacccctcccacagagggtgaggggcatgtaagttacttcatggaggagaaagcggagagcccactgtcatcccctaaaattcatggacttgaagagtcggagaatccctggctcccagaatctactgacagttactgaatgaggaaagagagaaaagtctcgcctcatcacgttttagggcttgagtgccctgacccagccactgtcccactgggaaggtccctagcaggtccccaatattaatgcatccatcctcacgatgaaccccagaggcccattgggaccctgaccctcttgtttcaggaacatcatggcctgatgcttctgaggccctcagcctttggggtcttttacttcaaaaagccccagtttccaaggatttaggattccaaatatccgccatcatctcagtagctgatgtttatcttgaattttccatgggtcagatacagtgctgaacatgtctcacaagtgatcatgttcaatcctcaccatggccccttgagctccatctcatcattattgtattcctgttatacagatgagggaaacggaggtataagtagtcaagcaacttgcccaagatcacagagctggcgagtgtgggtcccgctttctttggtgctgggctttgaaatccccaagctttcctgaacttgatgttctcaggttttaaattctaggatgtgatggcagggagatcctgggatttggagagtccttggagacttgaagcttgtgaggcttttaggttgtccaggaattggcggctgcatctcttgacctcagcaggcactctattcaaccactggtcagcatggtagaccagcccccaggggcttctcctgacaggccatggtgaagacttccagctcccagcaccctgcaaagcccagggttctagtcgtccaacaaccactccagccctctacaagactggcttcagacctggggaagagaaattggaaagggctttttatttacatggtacaaatctggtggccaagatccaccccttcacccctttgccccctttcctcccccaaccttctaagccctcgtaaaaaggagggcctctttcctcaactcagactcacccttctggaaaagcccagaatgggcctgatggcctggctttgtgaagacaagaaaaaaaaaaaaaaagaatagaaaaaaaaagaccttaaaaaaatcagccaacaacaattaaaaaaaaaaaaaaaacacccaaccctccccaccattagttcaaaacaaaactttcgctggttgaggcttctgagttggtgggacacatctgagacccaaaaatggcttgggtgtgttggacagccaggggaggcaccaaggtgggatgaggtcccctgcttggaggcctgcagggaccctgtgaacagcaggtgtttaacagatgtcacggcatgtgggagggagcaagggagggggtgaggagcatgcatgtcaggaaggagtcctggggagctgattctagtgatggccccaaggttaatgaccccttgcagtgatggtcctaaggttaatgatcccttgcactgatgttcccatagttaataaccccttgctccctgcagacttgggtcggaatgttccctacacctcctgcgtaattataaaccaggccagttctatcagcagaggcattgttccctgccccagcacctgtccccctcctggaaaagggggctagttttctctctcaggatcagaggtgtgggctgcattctccttataccttccccagaccatctgtcccttactgtcactcactccatgaaagagagtggccagagatataggaggcaaacgaagtgaggatggtggccgagaatgtgagctggccccttgggcaggcccagggtgtgagagggaaatgctacggctgctgaaagccaagatccttgcagaatgggggctggggtcaggagggcagagaggggtagaggtcgctacctcccctctatactggactatatcctctctcatggagggcttctcgggaaggagactgggagggctgggagttgggggtgagtaggcaagattaaacgggtcaggaaaagtccccagagacaggggcctctgacaaagacttgaaggagatgagggagggagccagctagatatctgaggaactccaaaggaaacagccagggcaaaggtcctgaggtgggaatgtacctgatttgttcaaggtctacaagggggctggtgtggttagtgtggagagagcaagaagagaagctggaggtgaggtcagaaaggggactcggaggttagaccacgcaggaccttgtaggccatggtaaggactttggcttcaacgctgagtgaggaggaaggcatgacagggttgcaagcagaggagaaacacaaaccgtgttaggatttaacaggaagcccctgaatgctgagtgtacaatggggtctagggcctgaatgtggaagcaggggaccagcaaggagctggctactgcagtagtctaggtgactggtgatagtgctggcagtggaggtggtgagaagaggatggatttggtaaatatttttaatagacagccaaaaggatttgttgaagactgagagtcttggagccagatcgggacagacaatgcccaaaccaggtgggcaggaaggagtccctggactatttgccagcttgaacttttaggtgagaaaaaaataaagttctgtcttgcttaagcccccattattttatgatttttctgttacttgcagctgaacatattcatttctaactcatggacatcctgaacatggagacctggggagaggggctgctggaaggatcacctccctcctaggatgctgtgaggttctaatgagataacagcatgctcagaacctggcactcagtaggtgttcagtaaatcttcccaggatggagaaggaatgtatgaatggatgtgttcagcggacaaaagctgcagttgagttcccacagaaggtgagaccccaaagggagagcgaaaggagtttactagatggaagcagcagaaggaacagcactcttgggagagggaacagtagaagcagagatggggggacagaaagaagggaggtgaggcccctgtggggtgtggagtgtcaggttgggcaagaaggacagggctttgattgtgattccattagtcagaagctacccatatgcccaatcaacttctggtagcacacagtcaggtcagtgtttgctgagctgaaatttaaaaaagtgaatccttcagaaagttaaatttcctattcggccattcattcaacaatagtatcaagtcctggagagtgcttgcggctaacaatcaggggcattcttggcttgtggcactgctcaagaaaaggttgtagttgggcagggaggacccagtaagtaactaactgcaacaggacagtcattttcactttcctagttcacacaccaaggtgtggtctaggccttcaggggctctgggtattcctggggcaatggggagtcacggagggttagggagagggtaaccccatccctgagaagcacatttttcctaatggctgcctgcgttctatggttctgctgtccggccacccaatacctcagactctgtctacacagcgtcctcctctccagcctccttattggctactcatgcctcccttcacaccacctacactgcccccgtcggctctgcttttttccccatcttgcctccaagtcctccctccgtcccgctgcactatctagcctcggcattggctcatcccatactagtactgtcctttgaggtctctacgccttcaccctggctccctcattggctatccgccagctctcgtcctcgctcccgccttcagcctccacctccattggctcggctccctacacacccgcctcttggtctccttttagccttcgtattggctagctccaccttggcaccaccccttcgaagccgcagtgcacgctcacaagcctccccattggctcgctgcagccattgtcgtcatcccacgcgtggctctccattggctgttctctctctctagctaccgttccaccgcctacgcaacccgcgggatctcccactttttgggcctctgcgttcgttcccggctgccctcatcgcctgtagccattccacttttcccaccgcccacatgcctctctcgctcagacttccgcattagctgtctgcttctgttttcttcatcatggatttcgcaccacccccattccggcctctccattgattcctcgatcatcccgccccctacaccgcccactcccgggcatccccattggctgcgtgcttctccggctctcaattcgctgtacgtcatccgtgcatggctgcccattggccctctgcaatacttgtcttcatctcaccgcctatgcccccgtgagccgtacccctccgcgctggccttcccattggctgcccgccccttcaggccctgcccccgccggtcccgccgccggtgccgtcggtgccgccgccgccgccgatatggcgcgtacggcccctgtggagcccccgctgcggcattccgcgcccccctcgccggccgcgggtgagccccgcacctcggtcgaggcggcggtggccccgcggagggtgctgttcgccgacgaggccttggggctgccgctggcgcagttgcgccgctaccggccgtggggcgggcccggggcgggcaagatggcggcggcggccgggcaagatggcggcggcggcggcggggccgacgaggacgacgatggcgaggatggggatgaaggggaggaggaagaggaggcttgccccgagccctcaccgctgtgccccgtccccgctggcggggggttttacctggtccccacattttcgctgccgcccgcgccgggccgtctggagcgcttggggcgcgtcatggtggagctggaggcgctgctgccgcctcccggagcggtccccgggggtgccggggtgtgggtgcctgggggccgcccgccggtgctgcgcgggttggtacgcgtgctgaaccgctccttcgagaaggcggtgcacgtgcgggcctcacacgacggctgggcttccttttgcgaccacccagcgcgctacgtcccgcgcagcccgccgtgggcaggagcgggaggaacaggagcaggagatcccatcctggatccggggctcggcctgggtcccggccaggcatccgcctcctcgcccgacgacggcggccgcaccgaccgctttgccttccagctgccctttgctgagggcgcgggcgatggggcgcgcctcgacttcgtggtgcgctatgagacccctgagggcactttctgggccaacaaccacggccgcaactacacagtcctgctccggatcgcacccgctcccacacccactgatgccgaagggctgccccagcagcagcagctgccgcagctggagccacagcccgagtgccagggtcccgtggaggctgaggccaggcagctgaagagctgcatgaagccggtgaggcgcaggtaatgtcagccagcgccacctccgccaacgcagggctgtgtctgggatggaggacaagcattccggcccaggaacccctcaggcctgctctccaggacagggaggagggtgcattgagtcagtcagtcaaagagtgatggaggtcaaacacgtgctaggcactgttttaactggggttttattcctccatttattgagttccactgtaaagccctgaacaagacagacatctaccctaccctcaaggattcatacaggctcctatgggagacagtttgaaaaaacaagcaagcaagcagataggataaatagggacaaagttagctgctgaagggagtaaggggatagattgggagggaatgactgtgtcagacatgctgttaaagggagggcctttgaggaggtgagtcccgaatgatgataaagaagagttatgcagatacggtggggaggtgggggagagtttgtaggaaaaggaacagggaggacttttctgaggaggtttcatttaaactaagtcctggatgatgaataacagttatgtgcatatatggaacaagggtgttctaggtagaggaaacagcaagtgcaaagtcctggggtggaaatgagcttggtgtgaatgatcagcagtgtgctggagtggagagaactgcaatgacatagtgtggaccaagggctttgccagtggggggtagagcagattctctttctgacagagcaggaaaccaggattccagaggtggagaaactggttgaggcagtgatggcacctggctcttccagttcacccatgcctgaccttgaagcctgtgcactctactgttaacgctgtaatctacttttgagtcctgtggaggcgaggggctgagcccatgctctcacaagaaagcagtggctctagcagagagacagaaccagatgggtactggacttgaagtttttgtcccttgtttttttgccacaccacctgtgatcatttagggacagggagaaataatcagttataccccagggggccccagaagatttccctaggtttcctctatcaagctatgagttctttaagggcagcagctagtcctgattctttttgcggtcacctaagtctggcccaggatcactagattctccctaaaatgtatacatttccctgttcctgggaggactgggaatggaaatgggaaaatgctttttggaccttgtatgtatacgcttggtcagaagcccctggctgcagtaagacatttgtgggttctgctggttctggtaaggccttaggctgtgagtggttcagaaaggtctagctccggtctggtgggcagatgtgcctgggtaactgagcaggcaggcaggtacccactcacccacctgtgagccccaccataatctgagacttcatttaaagggggcaggcagcatggtttttcttacagcattaagagtgtggattctggcatagattgcctgggttcaaatcctggcgctgccacttactggccttgtgaccttggccaacgcatttaactacaccatgcctcaggaccctcacctgtaaaacagaattatagcatctactttacgggataagagtaaaggtgctcagaaccgagtctggctcaaagtagtatcatacaggtgttagctagtgtcagtatttagggagccacacctacagtttcctggattcctctcctaaattcggctccgcccatcagctgtgtggccttgcctccgtttccttctctgctaagggaaatgacagtcactttgcatggttggattgaatgcagcaaacatgggcaaggtaactgaagcatggtggtaactgcaaaagataactggccagcatttactgatttctgtgctatgaacatcagatccattctctccgtgaggcctgctgtgcatgctgtgttgtgtaggtgctatgattatccccatttagtagaggggagacaggtagctcagagagatgagccagcttgctcaaagcctctcagctagtgagtgacagggccagggaagaaatgctagggacatttatttttttctatttttttttttttaaactggtcctctagaaagcgtggcatgattcagggcaaattctggatttcactcttggtgttcccagcatgtcgtgctttccttttacctttttttttttttttgctttatcgaggtatacctacataaagtgtactgatattctgtgtatagcccagtggatttgtacatatgtatgcacttgtgtagccaccacccagatgaagatactgagcaggtccagtaccccagagctaccttcatttctatcactttcccaagctgtcatccccgccggctgtcatgggaaccctgtctgtaagatgcgacagtttgggtaaaggagtttggtcattttaaagagtgtgaaaggcagagaacagagaaatcaaaaccttgcagggccaaggtgggtggagagggtgtttttcttttaacatacatgggcggttttaaggagaaattgaagcagcctgttcagacaattgttttggtatctggccccaggtctgtggttcctaacatgacttgtgatattattttaagtgggcagatggctttttgatagcttctttatctttcgatctcagctcttgcaaaggggaggttggtgctcattgcaagatcagcgataagggtttctttgtaggtcggtggctttcttggtgagtacatttcaacatattattgttttagaacctgtgtgctgccagtgacttgcagcactgttgaagactagccaccctttgtgacctagccctcttgggaaatggcggaggatctcagggtatatcccttacctgtgggagccctatcagagggcttcctgttgaggaaatgttggctgtaggccctctgtgcactgagcacagccacatcaggtgagggcatgggagaagtccgtggtagccatcaggatagagttcagaaacccaaatggctgctttccctgggttgctggaccaggcatttggtaactctaaagcttagagatgattcatcgacaagcatttattgactgcctactgtgtgctgggcacagtgctaggttccagcagggaaagagatgcagagtggtcctaagatgtcacagggcttgtgggatggagtacagaggatttgttgtatgagacctggctgagcccctgctcttcgccaggcacttcactgagtactatattttcatgcaaggtctggtttaattccgacaacattccctgtgaagtagagggttttaaatttctctttcctggatgagcaaactgaggctcccagagtccaaagtcctagggctggtgtggggaaaagccctcctgatcttccttggcacttgacactaccctttggaagtgtcctattcttcttaaaagtaaagaccaagagagcctcaccatggtcttcaagcaccctcccatcccattccccaatctggcctccactggctcatagtcttaacaccagtggtctttctgagctcctgtcaccatggtctttctgttactccaaagggcctcgctcctttctgctgcagggcctttgcccctgctgtttccttcaccaggaacatttatcccgtaccccttgcagtctcctccagtgttgatccctcagttctaagaggacttccccaggggagcctgtccaccccagtgtcctcgggcccctggctttttcatagcactcatcagcccagcacgtgctaagctttgttagagaatgtcccatggcagagcagatgaacatcgccaccagtcgaggggtcatcggccaccctgcctagcagttctactatatttttttgatccactcgtttctcctctgaagtgactctttcaaatgttctttaccttcagactttctctcctgcttcaaaaaacaaaacagaagccataagaatggaactccctataacttgtggcccccaagtctgcacgctgatttccctcccctgtgttacagatgacgaggagtcccttcttgctcaggccacttctccctcctgtgctctgggtcccagtttctgctacttgctctagaatctgacatcatcagtcaccttttctctcctggcaggttttctgctgccctccttgcttgatcctctattcacctttgcctgtgccagcatcccttctgtctccgctgaccccacgttctctccctcctgcttctggccagcacctcatcaccctccccttcactgctgacccctgcagagttgcctgtacttgccttctgcacttgctcacccccgtaagtgttagcccccggcatctgccagattctgcaggtggttttttagttttcctcttgaagtggttgaccactcctacttaaaacactttgtcttcccttgccttgagaccacactctgctggttttcctcttaactctctggcccttctctttctcctggctcttcccttagcttcatgtatccaaactcggcatctccacttgactgatggcccaaataattcctcaaactcaccttgtcggggactgcattcatcacctctcccacagtgttcccaagcagcctctcactcccctacctccccacttgctcgttttgcttttcagcatccttaagtaagccctgcctgaccctgtagattgggccagggacccttattctagggcattctttccttttctaaaggcactgatcgcagtttgtagttatatctttattagggggttgctggatgactctctgccccgctagactgtaagctccgtgaggggtagggacatggtctgctttcattcaccactgtattcctgcaggcctgccacagtgcctggcacttagcaggtgctcaataaatgtttgttgaaataatgagtttgagtatttttttaatgtcttcctccatactgaattgtaagcttcctagttgggtttgctcaccatggtgtctccaggatccgtcactggggctgatgcacaggaaggcccactgtctttcagtgcacctataactgaagggatggggatccaacctgctatctgagttggcagcctcaggggaaaccagaataactggagttgaacgggacaagtcaggggcatcttagttttctgtagagtgaggaattaatgtgaacgtgatcctcttttatgccacagaaaacttggtagggcattatggttaaggacatgggcctgaggccacgtgctaagaaagtggcagagctgggatctgagcctgtgtggtcctgctctagtgctccagctcttagctactgtaccaggctgggtgatgcattttaccagcagggcaacactgggcaagttgctttcctttcagagcttcagtttccctcaatggaaatttggagggggttactgttaagtgctttataggtacttttcaaatatttctttgatctgctgaacaactcactgatgtaggtattattatcccctccttagagatgaggtaactgaggcacagagaggttaagtaacttgccccaggtcacacagctgataggtggcagagctggaattgttcaaaattgcatatcctaaccctttattgagttgtgaaatcaatttactgggtttcaacaagcattaaaaagaaaaaggaaatagcataagaaatgccagtgtatcaccacatgcagtaaaggtaagtattgtttcactcgaagaacaaccatttttcagttatttatatgtctgtttacacgtgtgggtgtgctgggttatgatgtagaatggatttcttactatgggtcgtggccaaagaatgaagtcatggctgttgaagaagctcatggcacgagaaactgctctccctctaccccactggatcacccgcaagtcccagagttgaggctgacacacttgttggggaaggcaaagcagtgccccacataacttggtggctttcacagccaccttcaaaccctgttcttttcagaaagcagatggctcagggtaactgcaattctgagtatcgtggggcaggtttctgaagccactcatccccccggaaagtcagcgttatcttcaggttgactacatgggagccggggtctgctgagtttccctttgggtttcagtgcctgacccactttgggctggcaaaattctttgaaaacatgaatgctgggggtgctccagaggactcgggtggtggtggcaatggcagtctgtgactgctctgaaagtctgctttgcttttctccacagggcttgtcagccctcacccgctcgcttactctgtgactggcgaatcacctttcttggctttcttggctggcctaggccggggccaacaccacctctttccaaatcctcaccctctggtctcctcggggcctatcagcttggcagccattgtgtttcctgatggccggaggaatttgcacgcccaggagactggcgtgcaggcctgagatggccccttttagtcgacaccagcttgactagtgctcactagcacccaaatgatgcatgtccaagattttccagatctgtgtgccctggcccctatggctcactgcccttgaggggatgccacgtggtacttgtggggctggtgccaaaagaacaggtttccttcttgaaaacgagcaggcatactgcaggtacagttttgttcttaatcttctccctccccatttttctaagaacccctcttctctgttaccgatcagtgagtcagtatacatttgtacttgatttctcttactatcctcatgttgattgaagtcatagctgcccttgagtttttactgtgaaagacggttcaaagataacttgtttctttttaagcccacaatttcaaactctcttcaaagtggagccctcctggagtgtttgttaccagcgtggttgtgtagtcagtgagtgtagagatgcagttccttgagttttagtttttgcatttgtaaaaaggaagggtgttgttttgaaggatagatgtgaaggttttcaaatgccttggtgtgtcaatgagaggggcccatggtggaggaggtgaacaatacatgcttgtgctttctgctttcatatctgactttggagaacgacttgtttgcttctgtcgatgttgtggatcttgggattggctcaatggcgtgacctgctttttggatgttctcgccctcctcagccatggaaagggtgctctgggggctgaaggattgattgtgtatttgtttttctttctccttcctccaactgaattgtggagtcctttacctgctggctagctgattcctgagtgttctcctttttctgtctcacatctatgactgcagtggcttttagaagcctgtttgtaatatatgtccggactaggccagatggaggagaaggcttgcctgctactgcgcacaggtgggagggctggctttctgtctgtctgtgggccttcttgaagaggcttggtttagaagatcctaggaggaggatgttttctgtcatgaaggactatggtaacaaaaagaagtaagttagtgcagcctggcagaaattgtgttgaaacaaaagtccaaagacctggattttaggaccacggaggggattggtgtgagaccaagctggtttgctctgaatctctctttctcatctgtgatgtgtgggaggtggcagctgggctcccagagtcacccaccctaggccctgtagtattctgattcaagtacctctggtgggatttgtgagtcctagacagtagagaaagacagacggtcccttctagactctagatccgtatatatggttcaaatgttctccccgagggtgtttatagaaagcagttcttgcagccattctgtgtctagtggcctcctagccacgcatgtcccaggcccatggaggtagggaaatggggaatgaatatgtgggcaaaggcaggtccaaagaaaagcctgcatgaaggaggagggagggatcttgtctagtattgatgcctccctctatctacttctagaaaggatggagatgggttgggtaagaccccagtctccctcatccaagaagcagcagctgactgggtaagagccaaaaggcctgggttgtgatgtgaagtgtatgaccttgagccatttactcagcctctgttttatcctctgtaaaatggagacaatagtactgcctgcttcagaggattacaagtacctgtctcatagggtgattgtgaggattgaattaacacatgttgcccaggcaccgtggctcatgcctgtagtactaggacttcgggaggctgagatgggaggatcgcttgagtccaggagttcacgaccagcctggtcaacgtaggaagaccccatctctaaaaacaaaatacaaaaaaacaaaaacaaaaaccaaaaaaccccaaaaacttctttaaaaaaatgtgaagcacttagaacagtgtgtaatgccatagtaggtactatgtatgggtcagatggtgatactcgtttctgtgaaggtaattggttatgggttttcaaaaagtttcaaccaggccgggcacggtggctcatgcctgtaaccccagcacattgggaggccgaggagggtggatcacctgaggtcaggagtttgagaccagcctggccaacatggcgaaaccccgtctctattaaaaatacaaaaattagctggctgtgatggtgggtacctgtaatccctgatacttgagaggctgaggcaggagaatcacttgaacctgggaggcagaggttgcagtgagccgagatcatgctattgcactccagcctggcgacagaacgagactccatctcaaaaaaaaaaatttttcaaccattgtcagaagtatcaagaatgtcacattgcctcttaggaagaaaaaggtgtgggcattcgccccagctcctctcaggttttagtcaatgcttccctcatttaccttaatctgtagacacttgatactcattttcagaataagaacagtgacttctccatgatgagatgccacccctgggaggacccacctgaaatgcactcggcttatgccactcagggatctgactggcctggtgaaggaggagcaagacccataaatatctacagttgattcaatcccagctgtgtgtcaggccctgatttctggctgtccatcctcattcctcttgactgccctgtgcttagtgcacatcctgactccccggggctctgttttatgagtgaggaggtgaagcgacctgccaggctgatacggggacgagagggttagcatagggacccaggcctctgtgacctccctcccagtctccatttgcattccttcctctgcctcacagtcttgtctacctgccatttcttagaaaaggtgtttttgttttgttttgttttgttttgtttttgtgagataatctctcactctgtcgcccaggctggagtgcagtggtgtgatttcggctcactgcaatctctacctcttgggttcaagcgattttcctgcctcagcctcccaggtagttgggattacaggcgcccaccaccacgcccagctaatttttatatttttagtagagacggagtttcaccatgttggccaggctggtcttgaattcctgacctcaggtgatccacctgcctcggcctcccaaactgttgggattacagatgtgagccaccgcgtctggccctttttttttttttgagactgagtttcactcttgtcccctaggctggagtgcaatggcgcgatcttggctcactgcaacctccgcctcccaggttcaaatgattctcctgcctcggcctcccaagtagttgggactatgggcgtgcaccgccatgcccagctaattttttgtatttttagtagagacagggtttcatcatgttgcccaggctggtcttgaactcctaacctcaagtggtctccctgcctcggcctcccaaagtgctggaattacaggtgtaagccaccacgcccagccgaaaagatgggttcttctatcttttctctttccatagccaggaatgtatcctaaagaaatgatacaagtgtcgataaaactatgcccaatgctgtttgctggtttgctttgcaacctctaaatgaaagaacttagctgctcagtaggaagggaatggtatgatatgagtattaagcagccatttgaaatgtttgcaaaagtgtataatgatgtttcttactgttaaatggacaaagctagctgtgaaattatgtctgtagaatctaaatgatttcgtagaatatctggaaggaaattttccagaatggtaacagtagttgtctctggctgatgtgtgattgtttttcttgcttctttagactttcctgtattttgcgaattttctataatgaggctgtaggacttttaggatgaggggataaacaaaggcagcagaagagaaaacagcagctgtcaggtgaaggtgggctagcacagaggctcagaaggtgccagtgggtggcagaagtgacctctcagggtattattagatccatgtactctctcctctgccctgcaggcctgccgaggaggaactgaagacgaagaacatggatgataacacctttgccatgggtaagcaattggcaagcttcggaagttttagcttgtatttaccatgtctttcttcctactgtttttctttctataaaaatgaaaaaggctgggctcagtggctcatgcctgtaatcccagcactttgggaggctgaggcaggaggattgcttgaggccaggagttcgagatgagcctgggcaacatagtgagacctcatctcttaaaaaaaaaaaaaaaagacgggcatgctggcatgcatccgtagtccctgctactcgggaggctgagctgggaggatcatttgagcctgggaggttgatgctgcagtgagtcatgattgtgccactgcaccccagccttggtgacacatcgagaccctatctcaaaaaaaaaatgaaggggtaccctctgctttagattgtcacagaaagcttcagaggcaaaactgccagttggctaggatggcagattttcttaacaaaaccatacctacttgtatgcctgtcttgcccaatgctgcctttctcttccctctagcagagcatcctgatgtccaggagtcagtgggtccactggtagcccccacccctctccgtccatggccccagatgacacttcaggtaagtgggtccttgcagccttggagtagacagcccaataggaggctcacagtgtgactattgctgggctgggtggtggggcccactagctctgggtcctccctgggttggagggagggcacaaaactcagaacctgatgggggagggggagaatgcagttactcagctgggcttgtagaaatgtcatttgttaatttagcaaaaatttatggagtgcttgttctgtgctaagcactgttacaaacatgcaaaaacgctctttgagggggcttatgtgttagtagggtgagacatgataaagtaatagaatatatggtactttaggtgatgatgagtgataaggaaaaatagaaaggaatagggagtgggtgagagactctgtgtgtgtgtgtgtgtgtgtgtgtgtgtgtgtgtgtgtgtgtgtgtgttgtgggcgggggtcggttgcaactttagattgggtggcctgggaaggctttagtgattagtgagatctgagcgaagatctgaggaaggtgagagagtgagccacgtggataactaagggaagaacatcccaggcgagtgtgaagttcctgaggtgaggccatgactaacgtgtgtgagggacagtgtagaagccagcgcagcaggggcagaacgagggagggggagagtggtgcggggtgagggagagaggtggctgaggacagattgggtggtgcctcacaggccatggtgaagactttggcttttactccgagtgagggggagccgcaagagcattgtggacggaggagggatgtaatctgatttaggatttaacaggctccctctggctgctgcttggaaaatagacgtcagagtaagggtggaaacaggcgactcgtgaaggggaggccactgcagtggtccaggcgagagtgatggtaggtaggggaggtagagacattttggagggtgtgtgtgtgtgtgtgtgtgtgtgtgtgaactttttaattacaaaaagtttcaaacatacaaaagtaaaatagtataatgaacctacgtacaccatcccccagcttcagtaaatatcaacacgtgctcattcttattttatctgtaccccgtctcctccctcccattccctctggaattattttggaagacatccagacatcatcccatccataaatacttctgtttgtatctcagaaaattaagaactcttttttgtttttttttttgagacagagtctcactctgtcacctaggctggagtgcagtggtgtgatctcagcttactgcaacctctgcctcctgggttcaagcaagtacatccagctaatttttgtatttttagtagagacgggatccgttgccttggcctcccaaagtgctgggattacaggtgtgagccatcacgtctggccagaaaattaagaattcttaaccccacaatactatcatcacaccttagaaaataaacggtaattcctcagtatcatcaagtatttggtcagtgttcaagttttcttctctcataagtgtttaggatccaaacaaagttgacatgttgcatttgattgatgtgtctctttagatttttaaaatctcccccactttgtttctttgcaatttgttggttgaagaaactttgcttgtcctgtagaattttccagtctgggtctggctgattacatccaggtggaaatacatttcttactccatttttattaatttattaattatattaattaatgtaatcttattaaatttatttaatttatcaaattgtattaaacgaatgtatttaatcttttattattaaattaactagaattaactctatttaattctattattcccacttcctttattagctagaattcttctctaaagaaaaactgtcccacaccagctatttggctactttgagatatagtttgtgcagaaaaagcagtgtaaatatttaattttttccattttatttaccagttttcagagaagtactactacaaaggtgaccaataaaaggatttttggttttgtgtcattatgaactcatgaattctaaacatatttgaatgagtttcaatccattgcacttatttgtttgctttttttgatgcttaaattgaactatccctggctagtaggagcttattgagatgggctactctgtccttttgacacgccctcatcattctgtgagcctttctcacatcttccatgacaatatgtgctaggttcatcctgtactctccctgccccaagcctggaaacagccatttctttcttgcttttcttttctttattttctttttctttttctttcttttctttcctttcctttctttccttacctttcctttctttctttcctttcctttgtctctctctttctttcttttcttttactttatttttctttcctttctttcctctctctctctctttctttcttttttctttttctttcttttttttttttttttttttgagtcagagtctttctctgtcgcccaggctggagtgcagtggcacaatctcggttcactgcaacctctgccttctgggttcaagcaattctcctgtctcagcctcttgagtagctgggattacaggcacatgccaccacacccggctgatttttgtatttttgcagagatggggtttcaccatgttggccaggctggtcttgaactcctgacctgcctggtgatccacctgccttggcctcccaaagtgctgggattacaggcgtgagccactgagcctggccagaaacagctatttctttaaggagcactgattcctttcagtggagagtggcattcaaaggccaagatttgggggctcggcatgcttgctgctactagattggtcattgtttctaggccctttcaaaagatggagctaggaaataattgttttttaaagagaagatgatacatcatgggttcatatggacatcctggctatgttttgggatttttttgcattttattttttttaaaatttttttaatttttaatttttgaggggacatagtaagtgtatatatttatggagatgttttgatataggcatgcattgtgtaataatcacatcatggagaatgaggtatgcatctcctcaagcatttatcctgtgtgttacaaacaatccacttacactctttattttttttttttttgagacaaagtctctgtcgcccaggctgcagtgcagtggcacagtctcggctcactgcaatctctgccctctgggttcaagtgattctcctgcctcagcctcttgagattacaggcgcacaacaccacgcccagctaatttttgtatttttggtagagacggggtttcaccatgttggccaggctggtctcgaactcctagtttcatgtgatccgcccgccttggcttcctaaagtgcttggattacaggtgagagccactgtgcctggctacttacacttttagttattttaactggctctgttttgaaggtaagccagcagtatttagtgatgatcattcaccaaatattcacacccaccgaattcctcagctttataatctgcaagaagccctgttttactgcatccaattgtgttattttaccatagatgacagtctttggagtctagacagtgacagagggcgctttaaggcatttttatatagaaacccctgtggggctggctgtgggctgtcacacttcttactgtctctgcttgttccatcccctcctctgcttcattcccttgctttttctctgcccccttgccccggccatggctccaggtttctgacgttccgatgactggcaaccccgcagaagaaggtgatgtccccagaagcagtccacctgtggcttttacagaggtcctccaggcaccggccatcaggattcccccctcctcccctctctgtggcctgggtggctcccccagagaccaggcctcagggcccgatgcgagcgagggggccaccgggcctttcctggagcccagtcagcagcaggcagaggccacatggggagtatcgagtgagaatggaggggggctggaggctgtgagtgggtcagaggagctgctcggtgaggacaccatcgaccaggagctggagcagctctacctgtctcacctgagccgcctacgggctgctgtggctgcgggtggggcagggggtggtggggagggctccacagatggagggatgtcccccagccatcccctgggcatactgacggaccgcgacctgatcttgaagtggcctggccctgagcgggccctgaacagcgccctggctgaggagatcacgctgcactatgcccggctggggcgtggcgtggagctcatcaaggacaccgaagaccctgatgatgaaggggagggtgaagaggggctctctgtcacaccctccagcccagaaggggacagccccaaggaatcgcctccagaaatcctctccggggcccgttctgtggtagccacgatgggagatgtgtggctcccatgggcagagggctcaggatgtgacggccctgtggttctgggtacagagggtcagttcattggggatcctgagaaagggatgggcaaggacaccagctctttgcacatgaatagggtgatagctggggtgactgagtccctgggggaggccgggacagaagcccagatagaggtcaccagtgagtgggcaggcagcttggatcccatatctggcaaggagccagcctctcccgtccttctgcaggggcaaaatcccaccctcctcagtcccttgggggccgaagtctgtctctctagtgtagccaggcctcatgtgagctcccaggatgaaaaggatgcaggcccaagccttgaacccccaaagaagtctcccaccctagcagtccctgcagaatgtgtgtgtgcactgcctcctcagctccgggggcccttgacccagactctgggggtcctggccgggctagtggtggtccctgtggctctgaacagcggtgtgtccctcctggtgcttgcgctgtgcctctctctggcttggttctcataggctctgcttgtgggatcagcagaggcttaagatgggatacatggcctgtgcagtgaggggacctgggtcctttgcttctgagaatgctcaactgaaagagaggccttctcatccccaagctctccagtcaacacagggctccctgtggtgacaccagtggagatgagggaacgggtagatggtgtgagtgaggggaacttttagagtggaactgggcatgtcctccgcctaccccccgagcctgtatttatttttgtataattctctggatgagggagagtggtcgtgagctggtcttggggcacaattacccagagatatatttattaacagccaacctgtgcaacctgctggagctttatttttaatttaatttatatagagtacctattattatatgccacaatagagctctatgagaaacagtgtcttgcggtgtagtgttctcctgtttgggcatgagtgtgcagggtggtcactttctgtgggaggatcacagtggggagttgggggtgggacgtggtcgcctgctgctgcttcaacatgtctttccttgaagatgtgtgtctcctcgtctcgtggtcctaatccatatggttctttgtcttttccacattctgcctgtgggaccctacaggtgtgtatttggatggtggtggtgggagccagggaggaagagtggcagccacatgagggtttggtgtcagtcacatggttgcagtggtagctgtggtctcctgtggatgtggggacatcagttgtgaatcagccacaaggttttgaggttactgaaaaaacagcctttgacaccagcagggagaccccttagtccctgagataaggaaggcctcagaaaggaaagaggagttaatgtactgcagtacttggtagcacagttgctgtccacagacatcacatttctactaaaaacaggaagcccagaagctttgaaagaaagatatatatttattgcatgcaaataaaaaactgctcaacaaaataaaacaccacatatttatttacttccctttacagcaaaacctattggaagaaatatctatacgagctttcttcagttcttctatgatgcctttctgaaatagccccaatcagatcttttttgcccaaccatttcagcaaaactgctgaagatattcacattgttatagccatggttaagtctcagatgtcatcttacttgggatattggcagcatttgacatagttgatcatctctaccttgcaaccctttcttcacttggtttccaagataccacactctcctcatttcccttcttcctcactggccactgtgcaaagctgtcagttctcttgaaactgctttgtaggttcaatgcaaatccaaccacaattccaatagagttttgcctgtgtgtagatcatgacacattaattcttaaatttatgtagaagtgccaagactagccaggacactgatacttattgtaatggtatattcagatggcacgatatttttgcaagagtagacaaatcgaccaataaaaaaacagtgatctcggaaacagtgtagacacactcgtgtagacacagaactggtgaccaaggaagtgtgttagaccagtggggaaatgattggattttgaataaatagaacaattggttacccgcattgaaaaatatgaacttggatccctactttacaacacaaataaaaataattctaagtgggtttaaagcctaaatgcgaagggcaaaaccaaagcgctttaagaatacaatgaggcagggccgggtgctgtggctcactcttgtaatcccagcactttgggaggtctagatgggcggatcaggagtttgagaccaccagcctggccaacatggtgaaaccccgtctctactaaaaatacaaaaattagctgggcatccacctgtagtcccagctgtttgggaggctgaggcgggacaatcgtttgaactcagggggcagaggttgcagtgagccgagatggcaccactgcactccagcctgggccacagatcgagactccatctcaaaaacaaaacaaaacaaaaaacaaggcaaaacaccttcgtatactcatggtagcaaagtttttcttcatcacgacacagaaacaaccataaatgaaaattacgaaacattcagtgaccttaaaattaggaatgtccattgatcaaaagacaccataaagagagtgaaaaccttatgtagtaggttgctatgaataaaagcaaaacaaaaaggagtgaaaacacaagtgaaaaattgggaggagataatggaatcacatataactgatgaagggctcaaaccttagatgccaataagcatctaaataaattgtggtatattcgcagaatggaatattgtataatgagaatggaagatccataactgcacgaaagcatacagatgaatcacaaaaagccaaaaaaaagcttccacactgatccatttatgcaaagttcacaagcaggcaaaactcatgaattaccacctaaatggtgacattgtaaagaaaagcgaggggctgattaccagagtcaggatagtgttcacctctggcagagggagggatgtggctgagaaggggcccagaggacttctgggatgtcaataatggttcactgcttgacctgggagactgttcatggatgtgcaatttattcatcatcattaaaacagacttatgggctgggcgcggtggctcacacctataatcccagcactttgggaggctgaggcaggcatatcacttgaggtcaggagttcgagaccagcctggccaatgtggggaaaccccgtctgtactaaaagtataaaaattagccgggcgtggtggtgggcgcctgtaatcccagctacttgggaggctgaggcgggagaatcactagaacccaggaggtggaggttgcagtgggccgagatcgcaccactgcactctagtctgggcaacagagcgagactcttgtctcaaaaaaacaaaacaaccccccccatacatttaggttttatacactcttatgcaaagacctcacaagtgaagcagagtgcagtgggaagtgggagtagcatgagtgtccgagactcctgcacacaggcttgcagagactccagcctcctggtgtgaaccacagtgtaggcggcctccttcctgcagaacaatccctgggctccgggtcttgccttctgtttgtggagatcgactagtggggaatcctctatcgtgtgcccctgacaccagccatagagtggggcctcttgggatggacaggacctgcccatattgtcctcagatgttggggtccatctcccctcaggcctcattcacacccacaatagcccaggacacatgggctttggggcctggtgggcctcataaaagcctggaaccccgagccctggtggtgtgaccttgggcaagtcacccgtcctagaccagcctcagttccccattcataaagggggctaatgcccatcaagcagggtaggtgcaggctttggggaaaacgttgtactgccctcctcctgagcccatgttagacaggtcttatagtcaaggcagggtaggagggtggacaggaacaggggctggagcgacacagtttgggactaaattgcccagggtcacacagtgggcaagtggcttcagccctctgtgcctccctttgctcgtctgtcatcagggtaataacttttcctcctcacagggttaagtgaggaagaggtgagatgactcttcagtcactgagcagtgccaggcacagggcaagactgagtacacgcccgttgtcattccccctggctggagctcttgcaatcactgttatgcccccaccctgccctctcccattaatctgttaatgtggtgaattacattgataagtttgtacatctgtcttttaaaattgagacgcaatcttgttctgtcacccaagctggagtgcagtggcacaatcacggctcactgcagcctcaacctcctgggttcaagtgatcctccgacctcagcctcccgagtagctgggactacaggcacatgccaccatgcccagctaatttttatatttttactagagacagggttttgccatgttgcccaggctggtctcgagctcctcagctcaagcaatccacctgcctcagcctcccaaagttttgggattacaggcatgagcacgtccagcctacttttttctctctctctctctctctctctctctctctctctctctctctgtctctctcctttctttcttgacggagtctcgctctttctcccaggctggagtgaagtggcacattctcagctcactgtaacctctgccccctgggttcaagagattctcctgcctcagccttctgagtagctaggattacaggcatgcaccaccatgcccgactagtttttgtgtttttagtagagacagggtttcaccatgttggccaggctggtctcgaactcctgacctcaggtgatccacccgcctcagcctcccaaagtgctaggattacaggtatgagccaccacgactggccctacttttcttttttaaaattttagtggtcagttactagataaactctatttttatcacccat

SEQ ID NO: 1176 - DNA, 25598 bp, Homo sapiens
tgggtgcgcctgaggacatgagatgtgtggatgggcgtggcaggcttggagggtggctttttgtgtcagcaccacacctttatccacacaggttcctgtgttcccactggacaggccctcgccccactgtgggatgggtacccagaggggtcccctagcttattagggacttgactggagaaaatgtggataggtgggaaccatgcaaaggtgtgggggtgttcttggggcaacaccccctttcctcaggcagtttcctttgagcatatcttctgtcctaagatgttcactctgagggccccccatccttctcatgggcatttgaggcttgagagatggggcaggtgggtaggagctgtgacagggtcagggagatttctccacgagcaagcactctggcccgaggttgcagatggtgcctttacccacatagtcacagtctggccaccatcggtgcttcagtgggcatgcatgccgcactgggggcagttctcaggggaggctgaggctgggccacgtgaggaagggccttccctggcagccaggatgcccctcgtcactccccttaggagccccaggcccaggccactcaggtgtcagatgtgccagccacctcccggcggcctgaacaggtgagcagagtggtttggaggggggtgtcccaggcccttgcttgtctactgggcctgacaccccaaccctgactggcctgggcctcccaggtcacgtgggcagctcaggaacaggagctcgagtcccttcgggagcagctggaaggagtgaaccgcagcattgaggaggttgaggccgacatgaagaccctgggcgtcagctttgtgcaggtaaggggcggaggaggggctgcgcgttgggctaggtcagaaggagggcctcggggtgtgagggactagatggggcaagaggtgctctgtagaggtctgcacatggcagaagggttcctgggagccattagggatctgtgggcctcttgagggtggctatgagaatcaggccagggtgagggtctgtgggcatctatggggcaccgcgggtctgcatgggcaggggattgaggggtcctcggagggtctgtgggcatctgtggggtacccacgggtctgcatggacaggggattagggggtcctcggggtccttggcaccagcgtggagctgttagagaggcctgtgggggccacaggggtgtacagtcatctgtggagctccatgggggctgtggcatgtgactgggtatccaccggccaggcagagtctgagtgccggcacagcaagctcagtacagcagagcgtgagcaggccctgcgcctgaagagccgcgcggtggagctgctgcccgatgggactgccaaccttgccaagctgcaggtggggttggggctgtagctgggcggagaggggcagggtggggtggggtggggttggagggcccagcctgtgtgacatgtacccatcccccaccagcttgtggtggagaatagtgcccagcgggtcatccacttggcgggtcagtgggagaagcaccgggtcccactcctcgctgagtaccgccacctccgaaagctgcaggattgcagagaggtaagcagtggggccctgggctgtgggcgggccagggcaggctcggtccctctctagggggccatccctatgctctgctcactgtcttctgcctgtgggctcatggcagctggaatcttctcgacggctggcagagatccaagaactgcaccagagtgtccgggcggctgctgaagaggcccgcaggaaggaggaggtctataagcagctggtaaggcctgtgtgagggacctgggtagcttaggagggtggggggatggtcctggggcagtgcctgctatatccctgcctagatgtcagagctggagactctgcccagagatgtgtcccggctggcctacacccagcgcatcctggagatcgtgggcaacatccggaagcagaaggaagagatcaccaaggtacactgccagggccatggagggtgggtcatgtgggctgtcaggcatagtgtggccgcacagggacctcacaccctcaggcagagctgtccagtcacactctaacacagaatagtcacacacaatccatcccagtcacccctgacacagtgacacagtccctgtctggtacacatgaggaccctccactgctagccagcctgccccaggcaggggctcatggctgccatggtgtctgccagatcttgtctgatacgaaggagcttcagaaggaaatcaactccctatctgggaagctggaccggacgtttgcggtgactgatgagcttgtgttcaaggtgtggggcaggttgggcgggggtgagtggggtgaggctgggctgctgccttgtgcatctgctaattggctggctggggtccagacccaggccctgtgcgaggctggaggtgcactgatacccagggctggctttgtttcatggaggatgaagctagtggggtggtgggagagggtggccttcttagggcatggagatggtcaagggcagcccactgatacctttgaggtccctgtgtctggtcaggatgccaagaaggacgatgctgttcggaaggcctataagtatctagctgctctgcacgaggtgaggggagacatgtgcctggggtggggctgctgggggtgggtgggactgggtgcaagccttctgctcctgttgtccccagaactgcagccagctcatccagaccatcgaggacacaggcaccatcatgcgggaggttcgagacctcgaggagcaggtgaggcctgggggcaggatggggagccaaggcgggccggggggacagttcctcaggttatgctgacagaggctgtggagccacacacagccgatggctggacacccagccctgccccttagtgcctgtgacctgggacaggcaagtggcctactgtgagccccagcttccaccccaagggccctcctgtctgcctcccagggccatgggcagaggcttcagcttaaagatgtagggggaatcctgccacatggcgaaggatgctttgggtagagggaacaccacacgaggcctggccatgggacagagcaggctgttggagttggtgggaggggcccagagtggctgtgatgggggctggtgagcaggagctgggaaaggggctgtgtgtgctgagggggcatgtgttcacattgcctcagatcgagacagagctgggcaagaagaccctcagcaacctggagaagatccgggaggactaccgagccctccgccaggagaacgctggcctcctaggccgggtccgggaggcctgaggagccgccggcagaggtctctccccagcctcaggcagggatttggggtgctggaggcagtggccaagcacatgccctagctacttcctccgctgtccagttcctcctgctgcggccttggacccagacccctgcccactgaccgcaacccttatatggggtgatagtccagcatgtggggagctcggctgcagtttattggggacggtactgtgggttgggggccttggatcccaaataaatgagtagttcctctgcagtctaagctgaggcatggatcagggctcagggaatgggagtgaggtgagtggcaggggagacacggggtatttttggcaaggcagtgtgtgtggctgtgtgtgtctgcacgggactcaagagacccactggggggctgtgcgtgtgcatatgcgtgagatacacaggtgaattctaacaggccgtgtgtgtgagcgagcacgtgttgggacctcagatcctgagggtactgacgctgcttctgtgtaggcctctgggcacacccctgtgttgacagtgcccctgtgggccctgaggctggctgtgggtgcgtgccttggggtgtgtgggttgtcagggctgtgcttgtgtgtgattgtgtgatgatgcagctttgaggttgtttgagtgtactgaggcaggctctctgtgttttggggtttgtgttgagtgagggacaggattgtgacattttgtgtgtctgtgtgacttttccagccctgaagtaatctgtgcgagcagctgaggcaggctctgtgtggctggttgtgaaggctctgtttggctgcagggctcgactggggggtgtgtctggggcggaggtgggggctggggccaggaccggggcccctctgagcagccttggggcaaaggatatgatgggggagggggtggctgccagcgggggaacaggggccctggcaggcaagacagtggaaacctcacttcttggtccctgtgggcacatccagggcctatcatccctgcccccaccacctctgcctcccaccagtttggcccctgttcgtccatcctcctttccttgatcttgaggtcaggggccaggtgtagggttggaacacctgctgggcctctggctccgtttcttgcggaactccagctcatccacggtccacacagcccccttctcgctctccacccgcacaaagcacttgtgcagactcaggttgtggcggatggcgttctgtggaaggccggggacagggagcaggtgggcgtcaacctctgaggccagcagccaccaccaacaacccacatcccgttcctccccaatgtgcctatgagcccagacccaggcctgcccactttgagctgcgatggcacttgaggccatcccagtcaccgccacctcagaggagctcaccttccaggtggcaggatggtttctgaagaaggcaaacatgcgtgtgaaccagtggtagatctcattgagtgtccgctgcttctctggagcctccaggatggcctggaagttggggggtggggtaaggggcacattccccaaacttggggtttagaggggctatgacctaccccgagccatctgacatgggggcggaattgtaggggcaggtaatcagggacaggactagatgtggggtgaagcatggggtcaaagatggggttagaaaaggggtgaagtgtcgggttgggcagggttagatgggtgtgggtatggttgttctgggattaggtaagggatcaggactgaggttgggagtggggtcttgttcagggctagggctgaagtgaggtgaaaggtctgggatggagttggagttggggttctctgtggaggtgacatttcagggttggggaaggtgaagggtcagaagtggggtcaaggatttggaaggggtaaagggccaggccaacttaagggtcagggaaggggtgggttaagagtcaggctggggtggactcaggtggggggtctaggggtgagggatgggatgacttggctttaggtcagaagccagagatggtttgaattatcgagtatcttacgtgtcagggacatggttaggtggttaggctcagggcaaggatgaggttagttgtggggttcggtgtggagtgaggctgagggtcagggaatttgatcagtttggattcaggaatgggattacagagtcagcgatgatgattgcagtgaggctatcagtcaggatggggctaggtcagggtttcagttcagagacagtcggggaatatctggtatcatgtaggggtgaggttcaggtttggggttaggtgtggcgctaggatgaaggttctgagaaggcattggggaggctgagatgaaggagttgggatggggtgatgaagttaaggatcaaatgggtgttacaaggaaaggttgggaatggtgcccagttgggggtgtattgacatactggggtacgttggggccagggaaggagatggggttgggttggcataaaggctggggaaggagttagagtaagagctggggtacgtttagggcaaggtgcagagatggggttagctttaggctattttatgggtccaggagagggttaggtatggggctgaggtggacatctggaaaggggtaggtttagggtcagaatttggcatgctctggcctggatggtggtttaggtttggatttgcggacaggtttggggtgaagccagcatgaggggtcacatttgaggcacggcttggggatccttggggctggggcttgggaatggaggaacccactctgagggcactcagagggagacaggagtttgggaggcaggtcccccaccccatctttgtcttcctcctccttggggccgagctgccctgcttacccagcggatgagcgtggcgtaggtgaaagggggtcgcatgttgtggaacttgaagtagtccatgttgtggaggaactctgtcagagggtggggatgaatcaagccccatgcaggacctcctagctagctccctgtcccctccccctacaaggtgagtctacaggcctgagatctcaccgtcaacacccgtgtccacgggcacaggtactgtttgctgagcacctgacataagttgtatcatttattctttgcaccacttctgccaaaatagttctccccgaggttgaaaagaagcggagtaacttgcacaccaaaggatgcaagaggttaaatggcagagccaggatgacagtcaaggtctctgatccctgctaagcccacaggccaggcctggtggagagcagtggataggtgagctcgggcgaatccaccccgattttccttggtcaggggaggaaaggaggtgctcctggaattacttagcagggtccctcccttctgatggccgaatatagtagctggagtccagagtgggtgaggcatggccccaatccccaagggagtcagggctaggggcccgacactcgagaccatatggggggctttcaggccacggacatcccgaaaggaagcttttgtgagcggatgcattttcccaaaggctgagtggcggcagctgcagtggtggtggtggtgggaaggggcagcatggagctcctttgcaccctccacccagagcctgtcaggattaggagcttgggggcaccgtgtagtgcaaggaccattcttacctgggaatgtgctgtttccatggctaccccacaggtgcctccggacagcaaacaggctgtcaggggcctcccgggggccagaccaggctgggacgacagggccttggctgccagcagctacgatgcagcaggagcccttgtcggatgatgcctgggtgagggggagaggctggtgacccagaggcttaaacttcccactttttactttctattttatgttttttattttttttgatactgagtcttgctctgtcgcccaggctggagtgcagtggtgcaatctcggctcactgcaacccccacctcccagattcaagcaagtcttctgcctcagcctcccgagtagctgggactacaggtgcccgtcactacgcccagctaatttttgtatttttggtagagatggggtttcaccatgttagccaggctggtctcgaactcctgacctcatgtgatccacccgcttcagcctcccaaagtgctgggattacaggcatgagccactgcgcctggctccactttatttttaaatcagtgtttttcaaagcaaggacgccctcttctaaattccagtctgaggtggaatcccacaaaacagcatgagccgtatttattagagcacaggtgcggatgtcgtatgtggccactgatgctgggaccatgaactggggttgaatagggctctttaccacccaactgtgaccttgggaaagtcacctaaacccccctggcctcaatattcctcatctgtacattcgcatcatgagaaataaattaccaccagcaaagcgctcagaaacagtgcctggcctccagggctggcttcatgggcgtgtgacctatgtggttatgtggcaccctgtgctttgtttaatgctctgtggtcgccatcttgaaatctgaacaaggggccctgcaggttacatagctggtcctgctggcacacagcctgcatctggcaagtctggctatttgcatttgctttaacaactcaggatcacagtgtttggggatcttagagtcagagggttttttttttttttttttcttgagacggagtcttgatctgtcgcctaggctggagtgcagtggtatgatctcagctcactgcaaactccgcctcccaggttcaagcaattctctgcctcagcctcccaagtagttgggactacagacacctgccaccacgcctggctaattttttgtacttttagtagacacagggtttcaccatcttggcgaggctggtcttgaactcctgacctcgtgatccacccgcctcggcctcccaaagtgctgggattacaggcgtgagccaccacgcccagccggggtcagagggtttgtaagtagaaggggacagatttccaggtctgggcatgtttggagctggggacaggggcccctagctctcaggacctgaatgtgaggttaggttccctgcaccgtgcagacctcctccctgccccccagcagtctgagtctgccaccaccagtcctggggtcgctcaccacagatgaagccttggtcagtgccattttcccagccaggtgggcctgcatggcactcagcttctccttctccagcaccagctgtgaaatggcacaaacatgaggcctcagcctggcccttctctgccacatctttgcccaggctacggtcttccctgggagtgcccgctcctcttccttcctttataccagccctcgtcccaggtgaacttggtttctggcacatggtggacagaaggttttgcgcactatccctatcccttaccctccaccgccctggcattacctgctgctccagagactgtaccatctctctctggaggagacattgtgccctgcccttctcatccagaagatggtccgcctggcagtgcctaagtagggagaagattccatgcaggtgaccacgacaggcctggtctggctcaatgctctgaatggggagggcccagaccctctgggagttctctcctctgagccccagctcccctcccctctctacctcagtctccctctcacacccctcgttcccttaacacatgcccctcagcacctactgcatgtcaggcctgaactcaccacttgagcctggccagagtgctggagataatgttggaagtgtggtgagttgagaatgggccagggaggtgagagtgggcaaagcattctgggtggagggacggcctgtgcaaaggcctggctgcaaggaggacaggacatgtggggttgctgctaagggttgtgtgtagtgtggtgtgtatttgtgtgtgtgtgtgtgtgagagagagagaaagagagagagagagagagagagagagagagagagagagagagagagagagacatatggggggactgaggggaggcagcagcagccatctagaggagctagaactttgggaacagtggaataaggctggcatgttggcatgaggagtagcagggcaaagcaggagtgcagattctagagcctggctacatgggttcaaatcccagctctgtcactcaggaactgggagattttgatcaagacacttaacctctttggcctcagtctccttgtctgtaaaatgggggtaaataacagcacaaacgtttcttattatacatacgagaaaactgaggtcgagagaagctaagtaatttgtccaaggtcacacagccagtcagggatggagctgggatttgaacccacagtctcagagtttagctcttgcatcttactacttattgggatgaagcctgagctgagatctgcaccctagacctctccccacaagccagggccggtagactggcacaggcctgggccactcacttgaggaagtcctctggctcttcgaagaccttctcacatccgggccacttgcagacaccatttgccagcagtgggtaggagctctggggcacagccgaaagggtgctggggggacagagggtgtcaggggaggggataggagggcgaggatccttcccagccctgtccactgacctgtccttcctgggtgcactgggatttgggaaggtgcagagcagtgccggctccctggacacccattccaggctggccacgttgatccctgtgggtggggacagggcacctatggaggctgtgggctgggctctggagcttggcccacaaggcctctcattttgagcttcccaccctcctgagcctcgaaaaccctgactcccagggggctctgctgtccccaaagtcccaggcttctggcagagaagcttaaagacggccattcgcaggtgctgacattttgactagctttgtaaagctctgtggttttgtgattttgacattctgcatctttaaggttctgcacctgacgttttttggagggtggagtttccaagcctctgagacctgacacctttgacccccagagtactgcaattcagaatagcctacactgctcacagccaaggatctggggacttgggggttctgtgaagccatggggtacgggctgaggtgttaccaggtgggaggccaggccgggccttgagggagaagaccccagtggcggtggtgggtggtgtgaggctgatcatggctgggctctccagggggtgcacctgcagcacaggggtccgggcgtgggcatccaccgttgagagctggggggcacatgtgggctgtggttcagcctgactcggggcccctccccacagttctcccacctgctccctcctccctgcccattcaccgtccatacctggtgcatgaaatgtggcctgtcctggaggagtgcctgtaagtggggcaaggggcccagccgtgccccggagggtgccaccatgactaggggcagtgtgggcagctgggcagaaaggcaggtgggtgagaggccatcctgatcctcactgttctgtgtctaattcaaatactctgcactgcaagcccacatggtagatgctatgatcatcccccttttacacgtatggaaactgaggctcatggagatcgagtaactttttaaagatcaaacagctaataagttgcagagctggcctcagccctgtcacctcacctacttggccccagtcctcttctcttgtcacatggggatggggacacatagctatgctcatgggactacaatacggcctcctcctctcctgagacagggattgggaggtcggggagagcctccaatctctgaggcctggcaggtggggattttcttggccctgcaacatctgcataagtcacagacttgcctgggacccagaaaccacttcctgtgccccagccagcccccctcccgcccagtgccacagtaaaggtcggcacctgtaggtccaggtaccccaccctgcctgccccatcctgggcccagggcctcacctgcagctgcgatggtggcatggggttcaaggaagaagaggaggcatgggccccgcctcgaagatctcggccctggaaggttccccctgggccccgggcccccagcaggtctgaggctttgggtgcagccctccagctgggcgaggctcctggggatgggccaagggccaaggaaggggccgagggcttgccaggcctggggttgggcatcgggtccttgtccaagggcaggctgcgtagacaataggggaaaggagtcacacgtgtgctagggcggtatgagatactcgaccacctgagccacgtggacactcctctggtcaaagcaggcattggctgggacatgtcccgaggggccccatagttgcaccccagctctagacacacacacacacacacacacacacacacaccaagaacacaggtacatgtacatacccacacatgccccacgtgcagaggtccagcacctggcttgcctgcccacgctagcacagccctggtgtggatgtgtcctctatgagggcaatggttgtttccccctccacttgagagctgtttcaagcctcaggcctctagccctccctgcaccctgcacaggctgtgtttgctcatcttgccggagctggtctcggactttctcctcggagtcctattttgccccagtgactaggcatggactcaaaagattcatctggctgctgtgagtggggctagtgaggaggctattgtaacagtcctggcaagtgatgatgctggcacagaatgggctggtggcagtggagaaggcgagaagtgggtagattctgagacttaatctgaagctggatcaggagcagtgctagcagcttggatgtagtgggcaagagggagagtcaaagtgacatgggttttagcttgagcagctggaaggaccgagctgacattacctgagatgggggacatggcggggagttggattgggtgcaaaagtgcaggtgtagatagacatgaagagtctggcattaaatatgtgagtggaggagctgagggggcagctgaatacgggggtctggatctcagggcaaggaggcgagtccaggagtgtgatcatgcacggatccagcatggcaagtgacagagaggaggagagatggggtctcttgagctggggcctgtagaagcttctctacccagcccccatcagagttcaccccaatttctggccctcaagcctggctcatgctacaccccctgcctcaaatgcccactccttctcctctttccctgtccaagccacgcaagacctgctcttctattgtcctcaccttgaaagccctccacaatggctccgggccccctgctgagccccagaaccttccactccctgagggaagcactggcttttcaggatcctataatcctggtctgagaggaagccagagctggaagggactgcccagccaaccccattatacagaaggggatgctcagatgccgagttccgtagtcccatagtgacttgagaactccacttctttctttaggaagtgtttccgtgtgcacattttataaactctctggtgtgtgtgtgtgtgtgtctccatctccccgttccacctcacagcactgagttgggcacacagctgctgagagcagcccgggggagtatagaagggttctgggggagcagttgctccttcctttctttgctgtcacctcctgggggtggttgtcagagctgtggtgctgagggagatgagtgtgagaatccaggtattaagttcttagtctcctgggggcttagaacattactgcgtgagaaacaggagtgtgggtctgtggaggctccgaacaagggcctgggagagcactggtgagatgagaaggtgagtgaatgaatgaagccagagatggggtgatgctccttcaagccaagaaataacaaagattgccagcaaccaccagaagctgggggagaggcctggagcagcttctcccttatggcccccagaaggaaccaaccctggcaacaccttgatcttggactctggcctccagaactgtgagatgatcaatttctgttgctgaagccactcagttgtggtactttgttatagcagccagaacaaactaataccgatttcggtgcaaatggatgttttccaccactctggcctggcccatgtggctggcctgtggtcacttctgaagctgcctggacacttggccagagctaagaattctccccaaacacatgtgggatggcctgactcagcaaagcatagatacattctcagacagggacatggagatgatctgtctgggggtagaggacctagagggccgggctgggcagccggcttcctgcactgtctgttgggacgtccctttctgactgggtttctcagaagctgaatgggggatgtttctgggacacagattatgttttcatatcggggtctgcatctgggccctgttgtcacagcccccgacttgcccagatttttccgccattgacgtcatggcggccggatgcgccgggcttcatcgacaccacggaggaagagaagagggcagataccccaccccacaggtttcgttccgagaactggctgccctgtcctgcagcaggcttggcccaggtggggtgacatgggtgctggtggatgtggtaggtgatgtccatctggccactatgacaagcccctagctctgaagacctggcccttcttgggttgtggagaggacccaggtttgaagctctgagagtgccaggcaggctccacagatactgggacccctggggtcttcaaatagtataacaccaggacctcagaatcatagaacagcatttcttagatttaaaggatcctagaatctcaaaaccacagactgtggggtctacggtcccaaagtctcagtatgtgtaggccagtgtccctggtgtccaaactccttggaaccatctgaaagtcaggcagcttgctgcttcatagggcctcttgcctaccaggcctggaaacagagccagcctccctagggcctcagtctccctgtccactctggaacaacgttcccaaatacatggccactccgccagagatggcaacagggggaggaggaggttgaggctggtgtgcctttggtctgggcctcatggggggagctggaaaagcctcagccttcgccaatacagagcccatcatcagactctctagaggggccccacaatcaaggttttcggggaccagcaccagctctggggacacacagcctgactgactgacatgcctccatcatcaccacgctctggccaactaggcctcctgacctatggagtccggggcctcacctagcccagctcttgtgaggctgggccccacactgtgatcgtggatcgtccaacctgtgggaagttggggtccaacgtgtgagaaggcagaagggggaatggtagcccaggttccccttcccccttctgggtgctgaggggtaaactgaggccttcagttggggagagagccagaaccagggtcccacctagagtcctgagatctaggcttggatttcaactctgccgctgcatttcggtgaggccctgagatctctggtcttcaatttgcccttctacactgagcacggagaggcgtggagtagacaagggccagggcccttctacgctgtctggttaagtcattaggtgtctgcagggcttcaagttgacaattgcccctctatccaggggactggctgagagatagggatacatagagacaaagagacacacacaaagagcgagcaagagagaacaagagatagtgagagacattgagagaaatggacacatgcatggagagccagagtgcatgtgtgcgagaggaggattgcctcaaataagaacatttgctggtctctggctggttcaactgatgctgcctgaaataatcaagaataaagaagggcaaggtgccagggacacccatggctgggtattgaattgtattgcaaagcaacaatcagcaaaacagtgtggccctggtataagaacagatactggggaagagaacagaatagaaagcttggacatggacccacatatggagagaactgaatttgtgatgaatgtggcatttcaaactggaggaccatggagtatggtttaacaaatgtgtctgagataattagggagaagataaagttattgagtgaatagtcagtccattatcccaacaacccctccctgcccagtttgaaatgtcaccatcatcatataccctaaaatgcccagatccattcaagatataagttttaacacctaatgctgatcttgggtttattgtgtgtcaggccttgtgctaagtatttactgtggttaaaaattttaatctaaacaaagactcctgaggaaggtactattataaccattgcagtacatatgaggaaatggaggtatggagaggttaagtgcctggctaaaaatcacacatagggcttggggtgacgctgggtttgtcccagacagtctggctccagtacccacactcttaacctctatagtaaatggaaaaaatgaagccataaaagagactagaagccaacataggtgaacatttatctcattttcaagtaggaaaggactttctaagcacaaaaccagagacagaagccacagaaaaaaagactaacctatttgactgtataaaaccatcataagcatcacaaaaaacaccataaacaaatagaaaaaaagcaaatgatgaattggggaaaatatttgctatatatgtaatggctgatgaaaggttaataaccattccaaataaagagctgtggcaaatcaataagggaaaaataagatgaacaccctattaggagtaaggacatgaccagacaaccaaaaaaaaaaaaaaaaaaaagcatgaatggccaatgaatagtaaaagtaatcacaagatgcaaatttcaacaatgtgataatgtgtttttcttacctgtcatgttgggaaataattaaaacataataatactcacctagggttagcttaagtagagggagcataaaataggacaaccttttggaaggagaattagcagagagggtcataaactttaaaaatgcacgccccctttgccccagcaactcccttttcaggaatccaaggaagcagtcagggatgtttatagaaaaaaacgagaaacaaccggaatgtccaacaatcggcacttggtcaaatcaatcaaagttcatgctgatgtgaggacagtcttgtccatcatgaaagatcatgtgttcaaacaatttttagtaagcttcaaaaacactactgttaattgaataaagcaggaacaaaaccaatatatagcatgattctaatttggttacagaaatactaatagctaacacttcgtgagcacttactttgtgccaaacgctgtgctaagcctgcagaatcgagctcaccccagccctgaacaacctgtttgcttcctgaatatggactctggtcacacacatgcagtcctggggtaggtccacacagctaaactacggttgacaatggtgtgaagtgctccctgcccccccgccccaagggtctcctctaaagcgatacaagcaaagttcagttaagtgctcagcttgccccggcaccttgcaatcctcctgctactagggtgaacagaactgatgctcactctcataaaatgtaaaggtcctcggcgacattactattattaaacgccagctgtgtacaaagctctaggctggatgctggctgggaaggcaggtgggggaaggcaagaaaagagagcgggagagatggaggaaaggagatcgatggagtgtggtcaagatggaggagacagagataggggagatggtcagaggccaggagagatgcggggaaagagagtctgagtgtagcgacagacagatggcgggagaaagagaggcagagaaacatgtaaaagagcaagacagggtgagcagagagacagagaaggatgagaggcatcaagagctaagagacaaagagatgagagagatgcagttgaaattttcagttgcacctggacagcatttcaagttgttcaaagctctgaaatccataaagactggcagctgacatattttaaaaatcctatccatctacgtatcaattgatgaattcatttatttttgcccctgcccatgcattaagtacttcacctttaagtcttctgccatttattctattattatttttttaaagaccttacctggctggaatcacggtagctgggtacatcccactgtaccagagggcccctgacccccccgccgtgcctacctccctgccatctcctccaatggggcccacatctggtaggggagagcagggacactcaccttggtgaagtggactgacagaaaaggatcagcctggcttgtgggaaactgtcacgtatcaaaaacaactttgcttttataccgagaagaaaaaccacgctgtacggtgtggaagccgcagacctctctcttctaataatccaaatttttttcgatgagtgtgtgcgctgataatcacggggtgggggggggttctcatagttttttttttctctctctctgtgtttctccttttcttgattatgagacttaaacggaaattttgaaattttgggtttttttctttgccctttacgagtcatctgaaaatatgatttcttcccctcaccacagaggtgagaggtatcaatgagataatagggctcatgagaaaccacagtttttaaaacaaaagtgtatagagtttgaaaaaaaaaaaacaagggaaaagaactaaaataaatcacagggccaacccgaggcaggcagagacaccattctgtgagtgagaggatatttgagggtctctggggaaagaaagagaatctgaagctctatgtgtggatgggaaatgccagggaaagagacagaatagggctgggttcccagaggcctcgccctactccaggcctcagtttccctatagatggaattgatatggtccccattgcttgaactacccggcgaggggagttctgcaccccctgcaacacccctcccacagagggtgaggggcatgtaagttacttcatggaggagaaagcggagagcccactgtcatcccctaaaattcatggacttgaagagtcggagaatccctggctcccagaatctactgacagttactgaatgaggaaagagagaaaagtctcgcctcatcacgttttagggcttgagtgccctgacccagccactgtcccactgggaaggtccctagcaggtccccaatattaatgcatccatcctcacgatgaaccccagaggcccattgggaccctgaccctcttgtttcaggaacatcatggcctgatgcttctgaggccctcagcctttggggtcttttacttcaaaaagccccagtttccaaggatttaggattccaaatatccgccatcatctcagtagctgatgtttatcttgaattttccatgggtcagatacagtgctgaacatgtctcacaagtgatcatgttcaatcctcaccatggccccttgagctccatctcatcattattgtattcctgttatacagatgagggaaacggaggtataagtagtcaagcaacttgcccaagatcacagagctggcgagtgtgggtcccgctttctttggtgctgggctttgaaatccccaagctttcctgaacttgatgttctcaggttttaaattctaggatgtgatggcagggagatcctgggatttggagagtccttggagacttgaagcttgtgaggcttttaggttgtccaggaattggcggctgcatctcttgacctcagcaggcactctattcaaccactggtcagcatggtagaccagcccccaggggcttctcctgacaggccatggtgaagacttccagctcccagcaccctgcaaagcccagggttctagtcgtccaacaaccactccagccctctacaagactggcttcagacctggggaagagaaattggaaagggctttttatttacatggtacaaatctggtggccaagatccaccccttcacccctttgccccctttcctcccccaaccttctaagccctcgtaaaaaggagggcctctttcctcaactcagactcacccttctggaaaagcccagaatgggcctgatggcctggctttgtgaagacaagaaaaaaaaaaaaaaagaatagaaaaaaaaagaccttaaaaaaatcagccaacaacaattaaaaaaaaaaaaaaaacacccaaccctccccaccattagttcaaaacaaaactttcgctggttgaggcttctgagttggtgggacacatctgagacccaaaaatggcttgggtgtgttggacagccaggggaggcaccaaggtgggatgaggtcccctgcttggaggcctgcagggaccctgtgaacagcaggtgtttaacagatgtcacggcatgtgggagggagcaagggagggggtgaggagcatgcatgtcaggaaggagtcctggggagctgattctagtgatggccccaaggttaatgaccccttgcagtgatggtcctaaggttaatgatcccttgcactgatgttcccatagttaataaccccttgctccctgcagacttgggtcggaatgttccctacacctcctgcgtaattataaaccaggccagttctatcagcagaggcattgttccctgccccagcacctgtccccctcctggaaaagggggctagttttctctctcaggatcagaggtgtgggctgcattctccttataccttccccagaccatctgtcccttactgtcactcactccatgaaagagagtggccagagatataggaggcaaacgaagtgaggatggtggccgagaatgtgagctggccccttgggcaggcccagggtgtgagagggaaatgctacggctgctgaaagccaagatccttgcagaatgggggctggggtcaggagggcagagaggggtagaggtcgctacctcccctctatactggactatatcctctctcatggagggcttctcgggaaggagactgggagggctgggagttgggggtgagtaggcaagattaaacgggtcaggaaaagtccccagagacaggggcctctgacaaagacttgaaggagatgagggagggagccagctagatatctgaggaactccaaaggaaacagccagggcaaaggtcctgaggtgggaatgtacctgatttgttcaaggtctacaagggggctggtgtggttagtgtggagagagcaagaagagaagctggaggtgaggtcagaaaggggactcggaggttagaccacgcaggaccttgtaggccatggtaaggactttggcttcaacgctgagtgaggaggaaggcatgacagggttgcaagcagaggagaaacacaaaccgtgttaggatttaacaggaagcccctgaatgctgagtgtacaatggggtctagggcctgaatgtggaagcaggggaccagcaaggagctggctactgcagtagtctaggtgactggtgatagtgctggcagtggaggtggtgagaagaggatggatttggtaaatatttttaatagacagccaaaaggatttgttgaagactgagagtcttggagccagatcgggacagacaatgcccaaaccaggtgggcaggaaggagtccctggactatttgccagcttgaacttttaggtgagaaaaaaataaagttctgtcttgcttaagcccccattattttatgatttttctgttacttgcagctgaacatattcatttctaactcatggacatcctgaacatggagacctggggagaggggctgctggaaggatcacctccctcctaggatgctgtgaggttctaatgagataacagcatgctcagaacctggcactcagtaggtgttcagtaaatcttcccaggatggagaaggaatgtatgaatggatgtgttcagcggacaaaagctgcagttgagttcccacagaaggtgagaccccaaagggagagcgaaaggagtttactagatggaagcagcagaaggaacagcactcttgggagagggaacagtagaagcagagatggggggacagaaagaagggaggtgaggcccctgtggggtgtggagtgtcaggttgggcaagaaggacagggctttgattgtgattccattagtcagaagctacccatatgcccaatcaacttctggtagcacacagtcaggtcagtgtttgctgagctgaaatttaaaaaagtgaatccttcagaaagttaaatttcctattcggccattcattcaacaatagtatcaagtcctggagagtgcttgcggctaacaatcaggggcattcttggcttgtggcactgctcaagaaaaggttgtagttgggcagggaggacccagtaagtaactaactgcaacaggacagtcattttcactttcctagttcacacaccaaggtgtggtctaggccttcaggggctctgggtattcctggggcaatggggagtcacggagggttagggagagggtaaccccatccctgagaagcacatttttcctaatggctgcctgcgttctatggttctgctgtccggccacccaatacctcagactctgtctacacagcgtcctcctctccagcctccttattggctactcatgcctcccttcacaccacctacactgcccccgtcggctctgcttttttccccatcttgcctccaagtcctccctccgtcccgctgcactatctagcctcggcattggctcatcccatactagtactgtcctttgaggtctctacgccttcaccctggctccctcattggctatccgccagctctcgtcctcgctcccgccttcagcctccacctccattggctcggctccctacacacccgcctcttggtctccttttagccttcgtattggctagctccaccttggcaccaccccttcgaagccgcagtgcacgctcacaagcctccccattggctcgctgcagccattgtcgtcatcccacgcgtggctctccattggctgttctctctctctagctaccgttccaccgcctacgcaacccgcgggatctcccactttttgggcctctgcgttcgttcccggctgccctcatcgcctgtagccattccacttttcccaccgcccacatgcctctctcgctcagacttccgcattagctgtctgcttctgttttcttcatcatggatttcgcaccacccccattccggcctctccattgattcctcgatcatcccgccccctacaccgcccactcccgggcatccccattggctgcgtgcttctccggctctcaattcgctgtacgtcatccgtgcatggctgcccattggccctctgcaatacttgtcttcatctcaccgcctatgcccccgtgagccgtacccctccgcgctggccttcccattggctgcccgccccttcaggccctgcccccgccggtcccgccgccggtgccgtcggtgccgccgccgccgccgatatggcgcgtacggcccctgtggagcccccgctgcggcattccgcgcccccctcgccggccgcgggtgagccccgcacctcggtcgaggcggcggtggccccgcggagggtgctgttcgccgacgaggccttggggctgccgctggcgcagttgcgccgctaccggccgtggggcgggcccggggcgggcaagatggcggcggcggccgggcaagatggcggcggcggcggcggggccgacgaggacgacgatggcgaggatggggatgaaggggaggaggaagaggaggcttgccccgagccctcaccgctgtgccccgtccccgctggcggggggttttacctggtccccacattttcgctgccgcccgcgccgggccgtctggagcgcttggggcgcgtcatggtggagctggaggcgctgctgccgcctcccggagcggtccccgggggtgccggggtgtgggtgcctgggggccgcccgccggtgctgcgcgggttggtacgcgtgctgaaccgctccttcgagaaggcggtgcacgtgcgggcctcacacgacggctgggcttccttttgcgaccacccagcgcgctacgtcccgcgcagcccgccgtgggcaggagcgggaggaacaggagcaggagatcccatcctggatccggggctcggcctgggtcccggccaggcatccgcctcctcgcccgacgacggcggccgcaccgaccgctttgccttccagctgccctttgctgagggcgcgggcgatggggcgcgcctcgacttcgtggtgcgctatgagacccctgagggcactttctgggccaacaaccacggccgcaactacacagtcctgctccggatcgcacccgctcccacacccactgatgccgaagggctgccccagcagcagcagctgccgcagctggagccacagcccgagtgccagggtcccgtggaggctgaggccaggcagctgaagagctgcatgaagccggtgaggcgcaggtaatgtcagccagcgccacctccgccaacgcagggctgtgtctgggatggaggacaagcattccggcccaggaacccctcaggcctgctctccaggacagggaggagggtgcattgagtcagtcagtcaaagagtgatggaggtcaaacacgtgctaggcactgttttaactggggttttattcctccatttattgagttccactgtaaagccctgaacaagacagacatctaccctaccctcaaggattcatacaggctcctatgggagacagtttgaaaaaacaagcaagcaagcagataggataaatagggacaaagttagctgctgaagggagtaaggggatagattgggagggaatgactgtgtcagacatgctgttaaagggagggcctttgaggaggtgagtcccgaatgatgataaagaagagttatgcagatacggtggggaggtgggggagagtttgtaggaaaaggaacagggaggacttttctgaggaggtttcatttaaactaagtcctggatgatgaataacagttatgtgcatatatggaacaagggtgttctaggtagaggaaacagcaagtgcaaagtcctggggtggaaatgagcttggtgtgaatgatcagcagtgtgctggagtggagagaactgcaatgacatagtgtggaccaagggctttgccagtggggggtagagcagattctctttctgacagagcaggaaaccaggattccagaggtggagaaactggttgaggcagtgatggcacctggctcttccagttcacccatgcctgaccttgaagcctgtgcactctactgttaacgctgtaatctacttttgagtcctgtggaggcgaggggctgagcccatgctctcacaagaaagcagtggctctagcagagagacagaaccagatgggtactggacttgaagtttttgtcccttgtttttttgccacaccacctgtgatcatttagggacagggagaaataatcagttataccccagggggccccagaagatttccctaggtttcctctatcaagctatgagttctttaagggcagcagctagtcctgattctttttgcggtcacctaagtctggcccaggatcactagattctccctaaaatgtatacatttccctgttcctgggaggactgggaatggaaatgggaaaatgctttttggaccttgtatgtatacgcttggtcagaagcccctggctgcagtaagacatttgtgggttctgctggttctggtaaggccttaggctgtgagtggttcagaaaggtctagctccggtctggtgggcagatgtgcctgggtaactgagcaggcaggcaggtacccactcacccacctgtgagccccaccataatctgagacttcatttaaagggggcaggcagcatggtttttcttacagcattaagagtgtggattctggcatagattgcctgggttcaaatcctggcgctgccacttactggccttgtgaccttggccaacgcatttaactacaccatgcctcaggaccctcacctgtaaaacagaattatagcatctactttacgggataagagtaaaggtgctcagaaccgagtctggctcaaagtagtatcatacaggtgttagcta

SEQ ID NO: 1177 - DNA, 19714 bp, Homo sapiens
gctttttgtgtcagcaccacacctttatccacacaggttcctgtgttcccactggacaggccctcgccccactgtgggatgggtacccagaggggtcccctagcttattagggacttgactggagaaaatgtggataggtgggaaccatgcaaaggtgtgggggtgttcttggggcaacaccccctttcctcaggcagtttcctttgagcatatcttctgtcctaagatgttcactctgagggccccccatccttctcatgggcatttgaggcttgagagatggggcaggtgggtaggagctgtgacagggtcagggagatttctccacgagcaagcactctggcccgaggttgcagatggtgcctttacccacatagtcacagtctggccaccatcggtgcttcagtgggcatgcatgccgcactgggggcagttctcaggggaggctgaggctgggccacgtgaggaagggccttccctggcagccaggatgcccctcgtcactccccttaggagccccaggcccaggccactcaggtgtcagatgtgccagccacctcccggcggcctgaacaggtgagcagagtggtttggaggggggtgtcccaggcccttgcttgtctactgggcctgacaccccaaccctgactggcctgggcctcccaggtcacgtgggcagctcaggaacaggagctcgagtcccttcgggagcagctggaaggagtgaaccgcagcattgaggaggttgaggccgacatgaagaccctgggcgtcagctttgtgcaggtaaggggcggaggaggggctgcgcgttgggctaggtcagaaggagggcctcggggtgtgagggactagatggggcaagaggtgctctgtagaggtctgcacatggcagaagggttcctgggagccattagggatctgtgggcctcttgagggtggctatgagaatcaggccagggtgagggtctgtgggcatctatggggcaccgcgggtctgcatgggcaggggattgaggggtcctcggagggtctgtgggcatctgtggggtacccacgggtctgcatggacaggggattagggggtcctcggggtccttggcaccagcgtggagctgttagagaggcctgtgggggccacaggggtgtacagtcatctgtggagctccatgggggctgtggcatgtgactgggtatccaccggccaggcagagtctgagtgccggcacagcaagctcagtacagcagagcgtgagcaggccctgcgcctgaagagccgcgcggtggagctgctgcccgatgggactgccaaccttgccaagctgcaggtggggttggggctgtagctgggcggagaggggcagggtggggtggggtggggttggagggcccagcctgtgtgacatgtacccatcccccaccagcttgtggtggagaatagtgcccagcgggtcatccacttggcgggtcagtgggagaagcaccgggtcccactcctcgctgagtaccgccacctccgaaagctgcaggattgcagagaggtaagcagtggggccctgggctgtgggcgggccagggcaggctcggtccctctctagggggccatccctatgctctgctcactgtcttctgcctgtgggctcatggcagctggaatcttctcgacggctggcagagatccaagaactgcaccagagtgtccgggcggctgctgaagaggcccgcaggaaggaggaggtctataagcagctggtaaggcctgtgtgagggacctgggtagcttaggagggtggggggatggtcctggggcagtgcctgctatatccctgcctagatgtcagagctggagactctgcccagagatgtgtcccggctggcctacacccagcgcatcctggagatcgtgggcaacatccggaagcagaaggaagagatcaccaaggtacactgccagggccatggagggtgggtcatgtgggctgtcaggcatagtgtggccgcacagggacctcacaccctcaggcagagctgtccagtcacactctaacacagaatagtcacacacaatccatcccagtcacccctgacacagtgacacagtccctgtctggtacacatgaggaccctccactgctagccagcctgccccaggcaggggctcatggctgccatggtgtctgccagatcttgtctgatacgaaggagcttcagaaggaaatcaactccctatctgggaagctggaccggacgtttgcggtgactgatgagcttgtgttcaaggtgtggggcaggttgggcgggggtgagtggggtgaggctgggctgctgccttgtgcatctgctaattggctggctggggtccagacccaggccctgtgcgaggctggaggtgcactgatacccagggctggctttgtttcatggaggatgaagctagtggggtggtgggagagggtggccttcttagggcatggagatggtcaagggcagcccactgatacctttgaggtccctgtgtctggtcaggatgccaagaaggacgatgctgttcggaaggcctataagtatctagctgctctgcacgaggtgaggggagacatgtgcctggggtggggctgctgggggtgggtgggactgggtgcaagccttctgctcctgttgtccccagaactgcagccagctcatccagaccatcgaggacacaggcaccatcatgcgggaggttcgagacctcgaggagcaggtgaggcctgggggcaggatggggagccaaggcgggccggggggacagttcctcaggttatgctgacagaggctgtggagccacacacagccgatggctggacacccagccctgccccttagtgcctgtgacctgggacaggcaagtggcctactgtgagccccagcttccaccccaagggccctcctgtctgcctcccagggccatgggcagaggcttcagcttaaagatgtagggggaatcctgccacatggcgaaggatgctttgggtagagggaacaccacacgaggcctggccatgggacagagcaggctgttggagttggtgggaggggcccagagtggctgtgatgggggctggtgagcaggagctgggaaaggggctgtgtgtgctgagggggcatgtgttcacattgcctcagatcgagacagagctgggcaagaagaccctcagcaacctggagaagatccgggaggactaccgagccctccgccaggagaacgctggcctcctaggccgggtccgggaggcctgaggagccgccggcagaggtctctccccagcctcaggcagggatttggggtgctggaggcagtggccaagcacatgccctagctacttcctccgctgtccagttcctcctgctgcggccttggacccagacccctgcccactgaccgcaacccttatatggggtgatagtccagcatgtggggagctcggctgcagtttattggggacggtactgtgggttgggggccttggatcccaaataaatgagtagttcctctgcagtctaagctgaggcatggatcagggctcagggaatgggagtgaggtgagtggcaggggagacacggggtatttttggcaaggcagtgtgtgtggctgtgtgtgtctgcacgggactcaagagacccactggggggctgtgcgtgtgcatatgcgtgagatacacaggtgaattctaacaggccgtgtgtgtgagcgagcacgtgttgggacctcagatcctgagggtactgacgctgcttctgtgtaggcctctgggcacacccctgtgttgacagtgcccctgtgggccctgaggctggctgtgggtgcgtgccttggggtgtgtgggttgtcagggctgtgcttgtgtgtgattgtgtgatgatgcagctttgaggttgtttgagtgtactgaggcaggctctctgtgttttggggtttgtgttgagtgagggacaggattgtgacattttgtgtgtctgtgtgacttttccagccctgaagtaatctgtgcgagcagctgaggcaggctctgtgtggctggttgtgaaggctctgtttggctgcagggctcgactggggggtgtgtctggggcggaggtgggggctggggccaggaccggggcccctctgagcagccttggggcaaaggatatgatgggggagggggtggctgccagcgggggaacaggggccctggcaggcaagacagtggaaacctcacttcttggtccctgtgggcacatccagggcctatcatccctgcccccaccacctctgcctcccaccagtttggcccctgttcgtccatcctcctttccttgatcttgaggtcaggggccaggtgtagggttggaacacctgctgggcctctggctccgtttcttgcggaactccagctcatccacggtccacacagcccccttctcgctctccacccgcacaaagcacttgtgcagactcaggttgtggcggatggcgttctgtggaaggccggggacagggagcaggtgggcgtcaacctctgaggccagcagccaccaccaacaacccacatcccgttcctccccaatgtgcctatgagcccagacccaggcctgcccactttgagctgcgatggcacttgaggccatcccagtcaccgccacctcagaggagctcaccttccaggtggcaggatggtttctgaagaaggcaaacatgcgtgtgaaccagtggtagatctcattgagtgtccgctgcttctctggagcctccaggatggcctggaagttggggggtggggtaaggggcacattccccaaacttggggtttagaggggctatgacctaccccgagccatctgacatgggggcggaattgtaggggcaggtaatcagggacaggactagatgtggggtgaagcatggggtcaaagatggggttagaaaaggggtgaagtgtcgggttgggcagggttagatgggtgtgggtatggttgttctgggattaggtaagggatcaggactgaggttgggagtggggtcttgttcagggctagggctgaagtgaggtgaaaggtctgggatggagttggagttggggttctctgtggaggtgacatttcagggttggggaaggtgaagggtcagaagtggggtcaaggatttggaaggggtaaagggccaggccaacttaagggtcagggaaggggtgggttaagagtcaggctggggtggactcaggtggggggtctaggggtgagggatgggatgacttggctttaggtcagaagccagagatggtttgaattatcgagtatcttacgtgtcagggacatggttaggtggttaggctcagggcaaggatgaggttagttgtggggttcggtgtggagtgaggctgagggtcagggaatttgatcagtttggattcaggaatgggattacagagtcagcgatgatgattgcagtgaggctatcagtcaggatggggctaggtcagggtttcagttcagagacagtcggggaatatctggtatcatgtaggggtgaggttcaggtttggggttaggtgtggcgctaggatgaaggttctgagaaggcattggggaggctgagatgaaggagttgggatggggtgatgaagttaaggatcaaatgggtgttacaaggaaaggttgggaatggtgcccagttgggggtgtattgacatactggggtacgttggggccagggaaggagatggggttgggttggcataaaggctggggaaggagttagagtaagagctggggtacgtttagggcaaggtgcagagatggggttagctttaggctattttatgggtccaggagagggttaggtatggggctgaggtggacatctggaaaggggtaggtttagggtcagaatttggcatgctctggcctggatggtggtttaggtttggatttgcggacaggtttggggtgaagccagcatgaggggtcacatttgaggcacggcttggggatccttggggctggggcttgggaatggaggaacccactctgagggcactcagagggagacaggagtttgggaggcaggtcccccaccccatctttgtcttcctcctccttggggccgagctgccctgcttacccagcggatgagcgtggcgtaggtgaaagggggtcgcatgttgtggaacttgaagtagtccatgttgtggaggaactctgtcagagggtggggatgaatcaagccccatgcaggacctcctagctagctccctgtcccctccccctacaaggtgagtctacaggcctgagatctcaccgtcaacacccgtgtccacgggcacaggtactgtttgctgagcacctgacataagttgtatcatttattctttgcaccacttctgccaaaatagttctccccgaggttgaaaagaagcggagtaacttgcacaccaaaggatgcaagaggttaaatggcagagccaggatgacagtcaaggtctctgatccctgctaagcccacaggccaggcctggtggagagcagtggataggtgagctcgggcgaatccaccccgattttccttggtcaggggaggaaaggaggtgctcctggaattacttagcagggtccctcccttctgatggccgaatatagtagctggagtccagagtgggtgaggcatggccccaatccccaagggagtcagggctaggggcccgacactcgagaccatatggggggctttcaggccacggacatcccgaaaggaagcttttgtgagcggatgcattttcccaaaggctgagtggcggcagctgcagtggtggtggtggtgggaaggggcagcatggagctcctttgcaccctccacccagagcctgtcaggattaggagcttgggggcaccgtgtagtgcaaggaccattcttacctgggaatgtgctgtttccatggctaccccacaggtgcctccggacagcaaacaggctgtcaggggcctcccgggggccagaccaggctgggacgacagggccttggctgccagcagctacgatgcagcaggagcccttgtcggatgatgcctgggtgagggggagaggctggtgacccagaggcttaaacttcccactttttactttctattttatgttttttattttttttgatactgagtcttgctctgtcgcccaggctggagtgcagtggtgcaatctcggctcactgcaacccccacctcccagattcaagcaagtcttctgcctcagcctcccgagtagctgggactacaggtgcccgtcactacgcccagctaatttttgtatttttggtagagatggggtttcaccatgttagccaggctggtctcgaactcctgacctcatgtgatccacccgcttcagcctcccaaagtgctgggattacaggcatgagccactgcgcctggctccactttatttttaaatcagtgtttttcaaagcaaggacgccctcttctaaattccagtctgaggtggaatcccacaaaacagcatgagccgtatttattagagcacaggtgcggatgtcgtatgtggccactgatgctgggaccatgaactggggttgaatagggctctttaccacccaactgtgaccttgggaaagtcacctaaacccccctggcctcaatattcctcatctgtacattcgcatcatgagaaataaattaccaccagcaaagcgctcagaaacagtgcctggcctccagggctggcttcatgggcgtgtgacctatgtggttatgtggcaccctgtgctttgtttaatgctctgtggtcgccatcttgaaatctgaacaaggggccctgcaggttacatagctggtcctgctggcacacagcctgcatctggcaagtctggctatttgcatttgctttaacaactcaggatcacagtgtttggggatcttagagtcagagggttttttttttttttttttcttgagacggagtcttgatctgtcgcctaggctggagtgcagtggtatgatctcagctcactgcaaactccgcctcccaggttcaagcaattctctgcctcagcctcccaagtagttgggactacagacacctgccaccacgcctggctaattttttgtacttttagtagacacagggtttcaccatcttggcgaggctggtcttgaactcctgacctcgtgatccacccgcctcggcctcccaaagtgctgggattacaggcgtgagccaccacgcccagccggggtcagagggtttgtaagtagaaggggacagatttccaggtctgggcatgtttggagctggggacaggggcccctagctctcaggacctgaatgtgaggttaggttccctgcaccgtgcagacctcctccctgccccccagcagtctgagtctgccaccaccagtcctggggtcgctcaccacagatgaagccttggtcagtgccattttcccagccaggtgggcctgcatggcactcagcttctccttctccagcaccagctgtgaaatggcacaaacatgaggcctcagcctggcccttctctgccacatctttgcccaggctacggtcttccctgggagtgcccgctcctcttccttcctttataccagccctcgtcccaggtgaacttggtttctggcacatggtggacagaaggttttgcgcactatccctatcccttaccctccaccgccctggcattacctgctgctccagagactgtaccatctctctctggaggagacattgtgccctgcccttctcatccagaagatggtccgcctggcagtgcctaagtagggagaagattccatgcaggtgaccacgacaggcctggtctggctcaatgctctgaatggggagggcccagaccctctgggagttctctcctctgagccccagctcccctcccctctctacctcagtctccctctcacacccctcgttcccttaacacatgcccctcagcacctactgcatgtcaggcctgaactcaccacttgagcctggccagagtgctggagataatgttggaagtgtggtgagttgagaatgggccagggaggtgagagtgggcaaagcattctgggtggagggacggcctgtgcaaaggcctggctgcaaggaggacaggacatgtggggttgctgctaagggttgtgtgtagtgtggtgtgtatttgtgtgtgtgtgtgtgtgagagagagagaaagagagagagagagagagagagagagagagagagagagagagagagagagacatatggggggactgaggggaggcagcagcagccatctagaggagctagaactttgggaacagtggaataaggctggcatgttggcatgaggagtagcagggcaaagcaggagtgcagattctagagcctggctacatgggttcaaatcccagctctgtcactcaggaactgggagattttgatcaagacacttaacctctttggcctcagtctccttgtctgtaaaatgggggtaaataacagcacaaacgtttcttattatacatacgagaaaactgaggtcgagagaagctaagtaatttgtccaaggtcacacagccagtcagggatggagctgggatttgaacccacagtctcagagtttagctcttgcatcttactacttattgggatgaagcctgagctgagatctgcaccctagacctctccccacaagccagggccggtagactggcacaggcctgggccactcacttgaggaagtcctctggctcttcgaagaccttctcacatccgggccacttgcagacaccatttgccagcagtgggtaggagctctggggcacagccgaaagggtgctggggggacagagggtgtcaggggaggggataggagggcgaggatccttcccagccctgtccactgacctgtccttcctgggtgcactgggatttgggaaggtgcagagcagtgccggctccctggacacccattccaggctggccacgttgatccctgtgggtggggacagggcacctatggaggctgtgggctgggctctggagcttggcccacaaggcctctcattttgagcttcccaccctcctgagcctcgaaaaccctgactcccagggggctctgctgtccccaaagtcccaggcttctggcagagaagcttaaagacggccattcgcaggtgctgacattttgactagctttgtaaagctctgtggttttgtgattttgacattctgcatctttaaggttctgcacctgacgttttttggagggtggagtttccaagcctctgagacctgacacctttgacccccagagtactgcaattcagaatagcctacactgctcacagccaaggatctggggacttgggggttctgtgaagccatggggtacgggctgaggtgttaccaggtgggaggccaggccgggccttgagggagaagaccccagtggcggtggtgggtggtgtgaggctgatcatggctgggctctccagggggtgcacctgcagcacaggggtccgggcgtgggcatccaccgttgagagctggggggcacatgtgggctgtggttcagcctgactcggggcccctccccacagttctcccacctgctccctcctccctgcccattcaccgtccatacctggtgcatgaaatgtggcctgtcctggaggagtgcctgtaagtggggcaaggggcccagccgtgccccggagggtgccaccatgactaggggcagtgtgggcagctgggcagaaaggcaggtgggtgagaggccatcctgatcctcactgttctgtgtctaattcaaatactctgcactgcaagcccacatggtagatgctatgatcatcccccttttacacgtatggaaactgaggctcatggagatcgagtaactttttaaagatcaaacagctaataagttgcagagctggcctcagccctgtcacctcacctacttggccccagtcctcttctcttgtcacatggggatggggacacatagctatgctcatgggactacaatacggcctcctcctctcctgagacagggattgggaggtcggggagagcctccaatctctgaggcctggcaggtggggattttcttggccctgcaacatctgcataagtcacagacttgcctgggacccagaaaccacttcctgtgccccagccagcccccctcccgcccagtgccacagtaaaggtcggcacctgtaggtccaggtaccccaccctgcctgccccatcctgggcccagggcctcacctgcagctgcgatggtggcatggggttcaaggaagaagaggaggcatgggccccgcctcgaagatctcggccctggaaggttccccctgggccccgggcccccagcaggtctgaggctttgggtgcagccctccagctgggcgaggctcctggggatgggccaagggccaaggaaggggccgagggcttgccaggcctggggttgggcatcgggtccttgtccaagggcaggctgcgtagacaataggggaaaggagtcacacgtgtgctagggcggtatgagatactcgaccacctgagccacgtggacactcctctggtcaaagcaggcattggctgggacatgtcccgaggggccccatagttgcaccccagctctagacacacacacacacacacacacacacacacaccaagaacacaggtacatgtacatacccacacatgccccacgtgcagaggtccagcacctggcttgcctgcccacgctagcacagccctggtgtggatgtgtcctctatgagggcaatggttgtttccccctccacttgagagctgtttcaagcctcaggcctctagccctccctgcaccctgcacaggctgtgtttgctcatcttgccggagctggtctcggactttctcctcggagtcctattttgccccagtgactaggcatggactcaaaagattcatctggctgctgtgagtggggctagtgaggaggctattgtaacagtcctggcaagtgatgatgctggcacagaatgggctggtggcagtggagaaggcgagaagtgggtagattctgagacttaatctgaagctggatcaggagcagtgctagcagcttggatgtagtgggcaagagggagagtcaaagtgacatgggttttagcttgagcagctggaaggaccgagctgacattacctgagatgggggacatggcggggagttggattgggtgcaaaagtgcaggtgtagatagacatgaagagtctggcattaaatatgtgagtggaggagctgagggggcagctgaatacgggggtctggatctcagggcaaggaggcgagtccaggagtgtgatcatgcacggatccagcatggcaagtgacagagaggaggagagatggggtctcttgagctggggcctgtagaagcttctctacccagcccccatcagagttcaccccaatttctggccctcaagcctggctcatgctacaccccctgcctcaaatgcccactccttctcctctttccctgtccaagccacgcaagacctgctcttctattgtcctcaccttgaaagccctccacaatggctccgggccccctgctgagccccagaaccttccactccctgagggaagcactggcttttcaggatcctataatcctggtctgagaggaagccagagctggaagggactgcccagccaaccccattatacagaaggggatgctcagatgccgagttccgtagtcccatagtgacttgagaactccacttctttctttaggaagtgtttccgtgtgcacattttataaactctctggtgtgtgtgtgtgtgtgtctccatctccccgttccacctcacagcactgagttgggcacacagctgctgagagcagcccgggggagtatagaagggttctgggggagcagttgctccttcctttctttgctgtcacctcctgggggtggttgtcagagctgtggtgctgagggagatgagtgtgagaatccaggtattaagttcttagtctcctgggggcttagaacattactgcgtgagaaacaggagtgtgggtctgtggaggctccgaacaagggcctgggagagcactggtgagatgagaaggtgagtgaatgaatgaagccagagatggggtgatgctccttcaagccaagaaataacaaagattgccagcaaccaccagaagctgggggagaggcctggagcagcttctcccttatggcccccagaaggaaccaaccctggcaacaccttgatcttggactctggcctccagaactgtgagatgatcaatttctgttgctgaagccactcagttgtggtactttgttatagcagccagaacaaactaataccgatttcggtgcaaatggatgttttccaccactctggcctggcccatgtggctggcctgtggtcacttctgaagctgcctggacacttggccagagctaagaattctccccaaacacatgtgggatggcctgactcagcaaagcatagatacattctcagacagggacatggagatgatctgtctgggggtagaggacctagagggccgggctgggcagccggcttcctgcactgtctgttgggacgtccctttctgactgggtttctcagaagctgaatgggggatgtttctgggacacagattatgttttcatatcggggtctgcatctgggccctgttgtcacagcccccgacttgcccagatttttccgccattgacgtcatggcggccggatgcgccgggcttcatcgacaccacggaggaagagaagagggcagataccccaccccacaggtttcgttccgagaactggctgccctgtcctgcagcaggcttggcccaggtggggtgacatgggtgctggtggatgtggtaggtgatgtccatctggccactatgacaagcccctagctctgaagacctggcccttcttgggttgtggagaggacccaggtttgaagctctgagagtgccaggcaggctccacagatactgggacccctggggtcttcaaatagtataacaccaggacctcagaatcatagaacagcatttcttagatttaaaggatcctagaatctcaaaaccacagactgtggggtctacggtcccaaagtctcagtatgtgtaggccagtgtccctggtgtccaaactccttggaaccatctgaaagtcaggcagcttgctgcttcatagggcctcttgcctaccaggcctggaaacagagccagcctccctagggcctcagtctccctgtccactctggaacaacgttcccaaatacatggccactccgccagagatggcaacagggggaggaggaggttgaggctggtgtgcctttggtctgggcctcatggggggagctggaaaagcctcagccttcgccaatacagagcccatcatcagactctctagaggggccccacaatcaaggttttcggggaccagcaccagctctggggacacacagcctgactgactgacatgcctccatcatcaccacgctctggccaactaggcctcctgacctatggagtccggggcctcacctagcccagctcttgtgaggctgggccccacactgtgatcgtggatcgtccaacctgtgggaagttggggtccaacgtgtgagaaggcagaagggggaatggtagcccaggttccccttcccccttctgggtgctgaggggtaaactgaggccttcagttggggagagagccagaaccagggtcccacctagagtcctgagatctaggcttggatttcaactctgccgctgcatttcggtgaggccctgagatctctggtcttcaatttgcccttctacactgagcacggagaggcgtggagtagacaagggccagggcccttctacgctgtctggttaagtcattaggtgtctgcagggcttcaagttgacaattgcccctctatccaggggactggctgagagatagggatacatagagacaaagagacacacacaaagagcgagcaagagagaacaagagatagtgagagacattgagagaaatggacacatgcatggagagccagagtgcatgtgtgcgagaggaggattgcctcaaataagaacatttgctggtctctggctggttcaactgatgctgcctgaaataatcaagaataaagaagggcaaggtgccagggacacccatggctgggtattgaattgtattgcaaagcaacaatcagcaaaacagtgtggccctggtataagaacagatactggggaagagaacagaatagaaagcttggacatggacccacatatggagagaactgaatttgtgatgaatgtggcatttcaaactggaggaccatggagtatggtttaacaaatgtgtctgagataattagggagaagataaagttattgagtgaatagtcagtccattatcccaacaacccctccctgcccagtttgaaatgtcaccatcatcatataccctaaaatgcccagatccattcaagatataagttttaacacctaatgctgatcttgggtttattgtgtgtcaggccttgtgctaagtatttactgtggttaaaaattttaatctaaacaaagactcctgaggaaggtactattataaccattgcagtacatatgaggaaatggaggtatggagaggttaagtgcctggctaaaaatcacacatagggcttggggtgacgctgggtttgtcccagacagtctggctccagtacccacactcttaacctctatagtaaatggaaaaaatgaagccataaaagagactagaagccaacataggtgaacatttatctcattttcaagtaggaaaggactttctaagcacaaaaccagagacagaagccacagaaaaaaagactaacctatttgactgtataaaaccatcataagcatcacaaaaaacaccataaacaaatagaaaaaaagcaaatgatgaattggggaaaatatttgctatatatgtaatggctgatgaaaggttaataaccattccaaataaagagctgtggcaaatcaataagggaaaaataagatgaacaccctattaggagtaaggacatgaccagacaaccaaaaaaaaaaaaaaaaaaaagcatgaatggccaatgaatagtaaaagtaatcacaagatgcaaatttcaacaatgtgataatgtgtttttcttacctgtcatgttgggaaataattaaaacataataatactcacctagggttagcttaagtagagggagcataaaataggacaaccttttggaaggagaattagcagagagggtcataaactttaaaaatgcacgccccctttgccccagcaactcccttttcaggaatccaaggaagcagtcagggatgtttatagaaaaaaacgagaaacaaccggaatgtccaacaatcggcacttggtcaaatcaatcaaagttcatgctgatgtgaggacagtcttgtccatcatgaaagatcatgtgttcaaacaatttttagtaagcttcaaaaacactactgttaattgaataaagcaggaacaaaaccaatatatagcatgattctaatttggttacagaaatactaatagctaacacttcgtgagcacttactttgtgccaaacgctgtgctaagcctgcagaatcgagctcaccccagccctgaacaacctgtttgcttcctgaatatggactctggtcacacacatgcagtcctggggtaggtccacacagctaaactacggttgacaatggtgtgaagtgctccctgcccccccgccccaagggtctcctctaaagcgatacaagcaaagttcagttaagtgctcagcttgccccggcaccttgcaatcctcctgctactagggtgaacagaactgatgctcactctcataaaatgtaaaggtcctcggcgacattactattattaaacgccagctgtgtacaaagctctaggctggatgctggctgggaaggcaggtgggggaaggcaagaaaagagagcgggagagatggaggaaaggagatcgatggagtgtggtcaagatggaggagacagagataggggagatggtcagaggccaggagagatgcggggaaagagagtctgagtgtagcgacagacagatggcgggagaaagagaggcagagaaacatgtaaaagagcaagacagggtgagcagagagacagagaaggatgagaggcatcaagagctaagagacaaagagatgagagagatgcagttgaaattttcagttgcacctggacagcatttcaagttgttcaaagctctgaaatccataaagactggcagctgacatattttaaaaatcctatccatctacgtatcaattgatgaattcatttatttttgcccctgcccatgcattaagtacttcacctttaagtcttctgccatttattctattattatttttttaaagaccttacctggctggaatcacggtagctgggtacatcccactgtaccagagggcccctgacccccccgccgtgcctacctccctgccatctcctccaatggggcccacatctggtaggggagagcagggacactcaccttggtgaagtggactgacagaaaaggatcagcctggcttgtgggaaactgtcacgtatcaaaaacaactttgcttttataccgagaagaaaaaccacgctgtacggtgtggaagccgcagacctctctcttctaataatccaaatttttttcgatgagtgtgtgcgctgataatcacggggtgggggggggttctcatagttttttttttctctctctctgtgtttctccttttcttgattatgagacttaaacggaaattttgaaattttgggtttttttctttgccctttacgagtcatctgaaaatatgatttcttcccctcaccacagaggtgagaggtatcaatgagataatagggctcatgagaaaccacagtttttaaaacaaaagtgtatagagtttgaaaaaaaaaaaacaagggaaaagaactaaaataaatcacagggccaacccgaggcaggcagagacaccattctgtgagtgagaggatatttgagggtctctggggaaagaaagagaatctgaagctctatgtgtggatgggaaatgccagggaaagagacagaatagggctgggttcccagaggcctcgccctactccaggcctcagtttccctatagatggaattgatatggtccccattgcttgaactacccggcgaggggagttctgcaccccctgcaacacccctcccacagagggtgaggggcatgtaagttacttcatggaggagaaagcggagagcccactgtcatcccctaaaattcatggacttgaagagtcggagaatccctggctcccagaatctactgacagttactgaatgaggaaagagagaaaagtctcgcctcatcacgttttagggcttgagtgccctgacccagccactgtcccactgggaaggtccctagcaggtccccaatattaatgcatccatcctcacgatgaaccccagaggcccattgggaccctgaccctcttgtttcaggaacatcatggcctgatgcttctgaggccctcagcctttggggtcttttacttcaaaaagccccagtttccaaggatttaggattccaaatatccgccatcatctcagtagctgatgtttatcttgaattttccatgggtcagatacagtgctgaacatgtctcacaagtgatcatgttcaatcctcaccatggccccttgagctccatctcatcattattgtattcctgttatacagatgagggaaacggaggtataagtagtcaagcaacttgcccaagatcacagagctggcgagtgtgggtcccgctttctttggtgctgggctttgaaatccccaagctttcctgaacttgatgttctcaggttttaaattctaggatgtgatggcagggagatcctgggatttggagagtccttggagacttgaagcttgtgaggcttttaggttgtccaggaattggcggctgcatctcttgacctcagcaggcactctattcaaccactggtcagcatggtagaccagcccccaggggcttctcctgacaggccatggtgaagacttccagctcccagcaccctgcaaagcccagggttctagtcgtccaacaaccactccagccctctacaagactggcttcagacctggggaagagaaattggaaagggctttttatttacatggtacaaatctggtggccaagatccaccccttcacccctttgccccctttcctcccccaaccttctaagccctcgtaaaaaggagggcctctttcctcaactcagactcacccttctggaaaagcccagaatgggcctgatggcctggctttgtgaagacaagaaaaaaaaaaaaaaagaatagaaaaaaaaagaccttaaaaaaatcagccaacaacaattaaaaaaaaaaaaaaaacacccaaccctccccaccattagttcaaaacaaaactttcgctggttgaggcttctgagttggtgggacacatctgagacccaaaaatggcttgggtgtgttggacagccaggggaggca

SEQ ID NO: 1178 - DNA, 4047 bp, Homo sapiens
tatgattatccccatttagtagaggggagacaggtagctcagagagatgagccagcttgctcaaagcctctcagctagtgagtgacagggccagggaagaaatgctagggacatttatttttttctatttttttttttttaaactggtcctctagaaagcgtggcatgattcagggcaaattctggatttcactcttggtgttcccagcatgtcgtgctttccttttacctttttttttttttttgctttatcgaggtatacctacataaagtgtactgatattctgtgtatagcccagtggatttgtacatatgtatgcacttgtgtagccaccacccagatgaagatactgagcaggtccagtaccccagagctaccttcatttctatcactttcccaagctgtcatccccgccggctgtcatgggaaccctgtctgtaagatgcgacagtttgggtaaaggagtttggtcattttaaagagtgtgaaaggcagagaacagagaaatcaaaaccttgcagggccaaggtgggtggagagggtgtttttcttttaacatacatgggcggttttaaggagaaattgaagcagcctgttcagacaattgttttggtatctggccccaggtctgtggttcctaacatgacttgtgatattattttaagtgggcagatggctttttgatagcttctttatctttcgatctcagctcttgcaaaggggaggttggtgctcattgcaagatcagcgataagggtttctttgtaggtcggtggctttcttggtgagtacatttcaacatattattgttttagaacctgtgtgctgccagtgacttgcagcactgttgaagactagccaccctttgtgacctagccctcttgggaaatggcggaggatctcagggtatatcccttacctgtgggagccctatcagagggcttcctgttgaggaaatgttggctgtaggccctctgtgcactgagcacagccacatcaggtgagggcatgggagaagtccgtggtagccatcaggatagagttcagaaacccaaatggctgctttccctgggttgctggaccaggcatttggtaactctaaagcttagagatgattcatcgacaagcatttattgactgcctactgtgtgctgggcacagtgctaggttccagcagggaaagagatgcagagtggtcctaagatgtcacagggcttgtgggatggagtacagaggatttgttgtatgagacctggctgagcccctgctcttcgccaggcacttcactgagtactatattttcatgcaaggtctggtttaattccgacaacattccctgtgaagtagagggttttaaatttctctttcctggatgagcaaactgaggctcccagagtccaaagtcctagggctggtgtggggaaaagccctcctgatcttccttggcacttgacactaccctttggaagtgtcctattcttcttaaaagtaaagaccaagagagcctcaccatggtcttcaagcaccctcccatcccattccccaatctggcctccactggctcatagtcttaacaccagtggtctttctgagctcctgtcaccatggtctttctgttactccaaagggcctcgctcctttctgctgcagggcctttgcccctgctgtttccttcaccaggaacatttatcccgtaccccttgcagtctcctccagtgttgatccctcagttctaagaggacttccccaggggagcctgtccaccccagtgtcctcgggcccctggctttttcatagcactcatcagcccagcacgtgctaagctttgttagagaatgtcccatggcagagcagatgaacatcgccaccagtcgaggggtcatcggccaccctgcctagcagttctactatatttttttgatccactcgtttctcctctgaagtgactctttcaaatgttctttaccttcagactttctctcctgcttcaaaaaacaaaacagaagccataagaatggaactccctataacttgtggcccccaagtctgcacgctgatttccctcccctgtgttacagatgacgaggagtcccttcttgctcaggccacttctccctcctgtgctctgggtcccagtttctgctacttgctctagaatctgacatcatcagtcaccttttctctcctggcaggttttctgctgccctccttgcttgatcctctattcacctttgcctgtgccagcatcccttctgtctccgctgaccccacgttctctccctcctgcttctggccagcacctcatcaccctccccttcactgctgacccctgcagagttgcctgtacttgccttctgcacttgctcacccccgtaagtgttagcccccggcatctgccagattctgcaggtggttttttagttttcctcttgaagtggttgaccactcctacttaaaacactttgtcttcccttgccttgagaccacactctgctggttttcctcttaactctctggcccttctctttctcctggctcttcccttagcttcatgtatccaaactcggcatctccacttgactgatggcccaaataattcctcaaactcaccttgtcggggactgcattcatcacctctcccacagtgttcccaagcagcctctcactcccctacctccccacttgctcgttttgcttttcagcatccttaagtaagccctgcctgaccctgtagattgggccagggacccttattctagggcattctttccttttctaaaggcactgatcgcagtttgtagttatatctttattagggggttgctggatgactctctgccccgctagactgtaagctccgtgaggggtagggacatggtctgctttcattcaccactgtattcctgcaggcctgccacagtgcctggcacttagcaggtgctcaataaatgtttgttgaaataatgagtttgagtatttttttaatgtcttcctccatactgaattgtaagcttcctagttgggtttgctcaccatggtgtctccaggatccgtcactggggctgatgcacaggaaggcccactgtctttcagtgcacctataactgaagggatggggatccaacctgctatctgagttggcagcctcaggggaaaccagaataactggagttgaacgggacaagtcaggggcatcttagttttctgtagagtgaggaattaatgtgaacgtgatcctcttttatgccacagaaaacttggtagggcattatggttaaggacatgggcctgaggccacgtgctaagaaagtggcagagctgggatctgagcctgtgtggtcctgctctagtgctccagctcttagctactgtaccaggctgggtgatgcattttaccagcagggcaacactgggcaagttgctttcctttcagagcttcagtttccctcaatggaaatttggagggggttactgttaagtgctttataggtacttttcaaatatttctttgatctgctgaacaactcactgatgtaggtattattatcccctccttagagatgaggtaactgaggcacagagaggttaagtaacttgccccaggtcacacagctgataggtggcagagctggaattgttcaaaattgcatatcctaaccctttattgagttgtgaaatcaatttactgggtttcaacaagcattaaaaagaaaaaggaaatagcataagaaatgccagtgtatcaccacatgcagtaaaggtaagtattgtttcactcgaagaacaaccatttttcagttatttatatgtctgtttacacgtgtgggtgtgctgggttatgatgtagaatggatttcttactatgggtcgtggccaaagaatgaagtcatggctgttgaagaagctcatggcacgagaaactgctctccctctaccccactggatcacccgcaagtcccagagttgaggctgacacacttgttggggaaggcaaagcagtgccccacataacttggtggctttcacagccaccttcaaaccctgtt

SEQ ID NO: 1179 - DNA, 4049 bp, Homo sapiens
aatgcagcaaacatgggcaaggtaactgaagcatggtggtaactgcaaaagataactggccagcatttactgatttctgtgctatgaacatcagatccattctctccgtgaggcctgctgtgcatgctgtgttgtgtaggtgctatgattatccccatttagtagaggggagacaggtagctcagagagatgagccagcttgctcaaagcctctcagctagtgagtgacagggccagggaagaaatgctagggacatttatttttttctatttttttttttttaaactggtcctctagaaagcgtggcatgattcagggcaaattctggatttcactcttggtgttcccagcatgtcgtgctttccttttacctttttttttttttttgctttatcgaggtatacctacataaagtgtactgatattctgtgtatagcccagtggatttgtacatatgtatgcacttgtgtagccaccacccagatgaagatactgagcaggtccagtaccccagagctaccttcatttctatcactttcccaagctgtcatccccgccggctgtcatgggaaccctgtctgtaagatgcgacagtttgggtaaaggagtttggtcattttaaagagtgtgaaaggcagagaacagagaaatcaaaaccttgcagggccaaggtgggtggagagggtgtttttcttttaacatacatgggcggttttaaggagaaattgaagcagcctgttcagacaattgttttggtatctggccccaggtctgtggttcctaacatgacttgtgatattattttaagtgggcagatggctttttgatagcttctttatctttcgatctcagctcttgcaaaggggaggttggtgctcattgcaagatcagcgataagggtttctttgtaggtcggtggctttcttggtgagtacatttcaacatattattgttttagaacctgtgtgctgccagtgacttgcagcactgttgaagactagccaccctttgtgacctagccctcttgggaaatggcggaggatctcagggtatatcccttacctgtgggagccctatcagagggcttcctgttgaggaaatgttggctgtaggccctctgtgcactgagcacagccacatcaggtgagggcatgggagaagtccgtggtagccatcaggatagagttcagaaacccaaatggctgctttccctgggttgctggaccaggcatttggtaactctaaagcttagagatgattcatcgacaagcatttattgactgcctactgtgtgctgggcacagtgctaggttccagcagggaaagagatgcagagtggtcctaagatgtcacagggcttgtgggatggagtacagaggatttgttgtatgagacctggctgagcccctgctcttcgccaggcacttcactgagtactatattttcatgcaaggtctggtttaattccgacaacattccctgtgaagtagagggttttaaatttctctttcctggatgagcaaactgaggctcccagagtccaaagtcctagggctggtgtggggaaaagccctcctgatcttccttggcacttgacactaccctttggaagtgtcctattcttcttaaaagtaaagaccaagagagcctcaccatggtcttcaagcaccctcccatcccattccccaatctggcctccactggctcatagtcttaacaccagtggtctttctgagctcctgtcaccatggtctttctgttactccaaagggcctcgctcctttctgctgcagggcctttgcccctgctgtttccttcaccaggaacatttatcccgtaccccttgcagtctcctccagtgttgatccctcagttctaagaggacttccccaggggagcctgtccaccccagtgtcctcgggcccctggctttttcatagcactcatcagcccagcacgtgctaagctttgttagagaatgtcccatggcagagcagatgaacatcgccaccagtcgaggggtcatcggccaccctgcctagcagttctactatatttttttgatccactcgtttctcctctgaagtgactctttcaaatgttctttaccttcagactttctctcctgcttcaaaaaacaaaacagaagccataagaatggaactccctataacttgtggcccccaagtctgcacgctgatttccctcccctgtgttacagatgacgaggagtcccttcttgctcaggccacttctccctcctgtgctctgggtcccagtttctgctacttgctctagaatctgacatcatcagtcaccttttctctcctggcaggttttctgctgccctccttgcttgatcctctattcacctttgcctgtgccagcatcccttctgtctccgctgaccccacgttctctccctcctgcttctggccagcacctcatcaccctccccttcactgctgacccctgcagagttgcctgtacttgccttctgcacttgctcacccccgtaagtgttagcccccggcatctgccagattctgcaggtggttttttagttttcctcttgaagtggttgaccactcctacttaaaacactttgtcttcccttgccttgagaccacactctgctggttttcctcttaactctctggcccttctctttctcctggctcttcccttagcttcatgtatccaaactcggcatctccacttgactgatggcccaaataattcctcaaactcaccttgtcggggactgcattcatcacctctcccacagtgttcccaagcagcctctcactcccctacctccccacttgctcgttttgcttttcagcatccttaagtaagccctgcctgaccctgtagattgggccagggacccttattctagggcattctttccttttctaaaggcactgatcgcagtttgtagttatatctttattagggggttgctggatgactctctgccccgctagactgtaagctccgtgaggggtagggacatggtctgctttcattcaccactgtattcctgcaggcctgccacagtgcctggcacttagcaggtgctcaataaatgtttgttgaaataatgagtttgagtatttttttaatgtcttcctccatactgaattgtaagcttcctagttgggtttgctcaccatggtgtctccaggatccgtcactggggctgatgcacaggaaggcccactgtctttcagtgcacctataactgaagggatggggatccaacctgctatctgagttggcagcctcaggggaaaccagaataactggagttgaacgggacaagtcaggggcatcttagttttctgtagagtgaggaattaatgtgaacgtgatcctcttttatgccacagaaaacttggtagggcattatggttaaggacatgggcctgaggccacgtgctaagaaagtggcagagctgggatctgagcctgtgtggtcctgctctagtgctccagctcttagctactgtaccaggctgggtgatgcattttaccagcagggcaacactgggcaagttgctttcctttcagagcttcagtttccctcaatggaaatttggagggggttactgttaagtgctttataggtacttttcaaatatttctttgatctgctgaacaactcactgatgtaggtattattatcccctccttagagatgaggtaactgaggcacagagaggttaagtaacttgccccaggtcacacagctgataggtggcagagctggaattgttcaaaattgcatatcctaaccctttattgagttgtgaaatcaatttactgggtttcaacaagcattaaaaagaaaaaggaaatagcataagaaatgccagtgtatcaccacatgcagtaaaggtaagtattgtttcactcgaagaacaaccatttttcagttatttatatgtctgtttacacgtgtgggtgtgctgggttatgatgtagaatggatttcttactatgggtcgtggccaaagaatgaagtcatggctgttgaagaagc

SEQ ID NO: 1180 - DNA, 4039 bp, Homo sapiens
agacttccgcattagctgtctgcttctgttttcttcatcatggatttcgcaccacccccattccggcctctccattgattcctcgatcatcccgccccctacaccgcccactcccgggcatccccattggctgcgtgcttctccggctctcaattcgctgtacgtcatccgtgcatggctgcccattggccctctgcaatacttgtcttcatctcaccgcctatgcccccgtgagccgtacccctccgcgctggccttcccattggctgcccgccccttcaggccctgcccccgccggtcccgccgccggtgccgtcggtgccgccgccgccgccgatatggcgcgtacggcccctgtggagcccccgctgcggcattccgcgcccccctcgccggccgcgggtgagccccgcacctcggtcgaggcggcggtggccccgcggagggtgctgttcgccgacgaggccttggggctgccgctggcgcagttgcgccgctaccggccgtggggcgggcccggggcgggcaagatggcggcggcggccgggcaagatggcggcggcggcggcggggccgacgaggacgacgatggcgaggatggggatgaaggggaggaggaagaggaggcttgccccgagccctcaccgctgtgccccgtccccgctggcggggggttttacctggtccccacattttcgctgccgcccgcgccgggccgtctggagcgcttggggcgcgtcatggtggagctggaggcgctgctgccgcctcccggagcggtccccgggggtgccggggtgtgggtgcctgggggccgcccgccggtgctgcgcgggttggtacgcgtgctgaaccgctccttcgagaaggcggtgcacgtgcgggcctcacacgacggctgggcttccttttgcgaccacccagcgcgctacgtcccgcgcagcccgccgtgggcaggagcgggaggaacaggagcaggagatcccatcctggatccggggctcggcctgggtcccggccaggcatccgcctcctcgcccgacgacggcggccgcaccgaccgctttgccttccagctgccctttgctgagggcgcgggcgatggggcgcgcctcgacttcgtggtgcgctatgagacccctgagggcactttctgggccaacaaccacggccgcaactacacagtcctgctccggatcgcacccgctcccacacccactgatgccgaagggctgccccagcagcagcagctgccgcagctggagccacagcccgagtgccagggtcccgtggaggctgaggccaggcagctgaagagctgcatgaagccggtgaggcgcaggtaatgtcagccagcgccacctccgccaacgcagggctgtgtctgggatggaggacaagcattccggcccaggaacccctcaggcctgctctccaggacagggaggagggtgcattgagtcagtcagtcaaagagtgatggaggtcaaacacgtgctaggcactgttttaactggggttttattcctccatttattgagttccactgtaaagccctgaacaagacagacatctaccctaccctcaaggattcatacaggctcctatgggagacagtttgaaaaaacaagcaagcaagcagataggataaatagggacaaagttagctgctgaagggagtaaggggatagattgggagggaatgactgtgtcagacatgctgttaaagggagggcctttgaggaggtgagtcccgaatgatgataaagaagagttatgcagatacggtggggaggtgggggagagtttgtaggaaaaggaacagggaggacttttctgaggaggtttcatttaaactaagtcctggatgatgaataacagttatgtgcatatatggaacaagggtgttctaggtagaggaaacagcaagtgcaaagtcctggggtggaaatgagcttggtgtgaatgatcagcagtgtgctggagtggagagaactgcaatgacatagtgtggaccaagggctttgccagtggggggtagagcagattctctttctgacagagcaggaaaccaggattccagaggtggagaaactggttgaggcagtgatggcacctggctcttccagttcacccatgcctgaccttgaagcctgtgcactctactgttaacgctgtaatctacttttgagtcctgtggaggcgaggggctgagcccatgctctcacaagaaagcagtggctctagcagagagacagaaccagatgggtactggacttgaagtttttgtcccttgtttttttgccacaccacctgtgatcatttagggacagggagaaataatcagttataccccagggggccccagaagatttccctaggtttcctctatcaagctatgagttctttaagggcagcagctagtcctgattctttttgcggtcacctaagtctggcccaggatcactagattctccctaaaatgtatacatttccctgttcctgggaggactgggaatggaaatgggaaaatgctttttggaccttgtatgtatacgcttggtcagaagcccctggctgcagtaagacatttgtgggttctgctggttctggtaaggccttaggctgtgagtggttcagaaaggtctagctccggtctggtgggcagatgtgcctgggtaactgagcaggcaggcaggtacccactcacccacctgtgagccccaccataatctgagacttcatttaaagggggcaggcagcatggtttttcttacagcattaagagtgtggattctggcatagattgcctgggttcaaatcctggcgctgccacttactggccttgtgaccttggccaacgcatttaactacaccatgcctcaggaccctcacctgtaaaacagaattatagcatctactttacgggataagagtaaaggtgctcagaaccgagtctggctcaaagtagtatcatacaggtgttagctagtgtcagtatttagggagccacacctacagtttcctggattcctctcctaaattcggctccgcccatcagctgtgtggccttgcctccgtttccttctctgctaagggaaatgacagtcactttgcatggttggattgaatgcagcaaacatgggcaaggtaactgaagcatggtggtaactgcaaaagataactggccagcatttactgatttctgtgctatgaacatcagatccattctctccgtgaggcctgctgtgcatgctgtgttgtgtaggtgctatgattatccccatttagtagaggggagacaggtagctcagagagatgagccagcttgctcaaagcctctcagctagtgagtgacagggccagggaagaaatgctagggacatttatttttttctatttttttttttttaaactggtcctctagaaagcgtggcatgattcagggcaaattctggatttcactcttggtgttcccagcatgtcgtgctttccttttacctttttttttttttttgctttatcgaggtatacctacataaagtgtactgatattctgtgtatagcccagtggatttgtacatatgtatgcacttgtgtagccaccacccagatgaagatactgagcaggtccagtaccccagagctaccttcatttctatcactttcccaagctgtcatccccgccggctgtcatgggaaccctgtctgtaagatgcgacagtttgggtaaaggagtttggtcattttaaagagtgtgaaaggcagagaacagagaaatcaaaaccttgcagggccaaggtgggtggagagggtgtttttcttttaacatacatgggcggttttaaggagaaattgaagcagcctgttcagacaattgttttggtatctggccccaggtctgtggttcctaacatgacttgtgatattattttaagtgggcagatggctttttgatagcttctttatctttcgatctcagctcttgcaaaggggaggttggtgctcattgcaagatcagcgataagggtttctttgt

SEQ ID NO: 1181 - DNA, 4047 bp, Homo sapiens
tccattggctgttctctctctctagctaccgttccaccgcctacgcaacccgcgggatctcccactttttgggcctctgcgttcgttcccggctgccctcatcgcctgtagccattccacttttcccaccgcccacatgcctctctcgctcagacttccgcattagctgtctgcttctgttttcttcatcatggatttcgcaccacccccattccggcctctccattgattcctcgatcatcccgccccctacaccgcccactcccgggcatccccattggctgcgtgcttctccggctctcaattcgctgtacgtcatccgtgcatggctgcccattggccctctgcaatacttgtcttcatctcaccgcctatgcccccgtgagccgtacccctccgcgctggccttcccattggctgcccgccccttcaggccctgcccccgccggtcccgccgccggtgccgtcggtgccgccgccgccgccgatatggcgcgtacggcccctgtggagcccccgctgcggcattccgcgcccccctcgccggccgcgggtgagccccgcacctcggtcgaggcggcggtggccccgcggagggtgctgttcgccgacgaggccttggggctgccgctggcgcagttgcgccgctaccggccgtggggcgggcccggggcgggcaagatggcggcggcggccgggcaagatggcggcggcggcggcggggccgacgaggacgacgatggcgaggatggggatgaaggggaggaggaagaggaggcttgccccgagccctcaccgctgtgccccgtccccgctggcggggggttttacctggtccccacattttcgctgccgcccgcgccgggccgtctggagcgcttggggcgcgtcatggtggagctggaggcgctgctgccgcctcccggagcggtccccgggggtgccggggtgtgggtgcctgggggccgcccgccggtgctgcgcgggttggtacgcgtgctgaaccgctccttcgagaaggcggtgcacgtgcgggcctcacacgacggctgggcttccttttgcgaccacccagcgcgctacgtcccgcgcagcccgccgtgggcaggagcgggaggaacaggagcaggagatcccatcctggatccggggctcggcctgggtcccggccaggcatccgcctcctcgcccgacgacggcggccgcaccgaccgctttgccttccagctgccctttgctgagggcgcgggcgatggggcgcgcctcgacttcgtggtgcgctatgagacccctgagggcactttctgggccaacaaccacggccgcaactacacagtcctgctccggatcgcacccgctcccacacccactgatgccgaagggctgccccagcagcagcagctgccgcagctggagccacagcccgagtgccagggtcccgtggaggctgaggccaggcagctgaagagctgcatgaagccggtgaggcgcaggtaatgtcagccagcgccacctccgccaacgcagggctgtgtctgggatggaggacaagcattccggcccaggaacccctcaggcctgctctccaggacagggaggagggtgcattgagtcagtcagtcaaagagtgatggaggtcaaacacgtgctaggcactgttttaactggggttttattcctccatttattgagttccactgtaaagccctgaacaagacagacatctaccctaccctcaaggattcatacaggctcctatgggagacagtttgaaaaaacaagcaagcaagcagataggataaatagggacaaagttagctgctgaagggagtaaggggatagattgggagggaatgactgtgtcagacatgctgttaaagggagggcctttgaggaggtgagtcccgaatgatgataaagaagagttatgcagatacggtggggaggtgggggagagtttgtaggaaaaggaacagggaggacttttctgaggaggtttcatttaaactaagtcctggatgatgaataacagttatgtgcatatatggaacaagggtgttctaggtagaggaaacagcaagtgcaaagtcctggggtggaaatgagcttggtgtgaatgatcagcagtgtgctggagtggagagaactgcaatgacatagtgtggaccaagggctttgccagtggggggtagagcagattctctttctgacagagcaggaaaccaggattccagaggtggagaaactggttgaggcagtgatggcacctggctcttccagttcacccatgcctgaccttgaagcctgtgcactctactgttaacgctgtaatctacttttgagtcctgtggaggcgaggggctgagcccatgctctcacaagaaagcagtggctctagcagagagacagaaccagatgggtactggacttgaagtttttgtcccttgtttttttgccacaccacctgtgatcatttagggacagggagaaataatcagttataccccagggggccccagaagatttccctaggtttcctctatcaagctatgagttctttaagggcagcagctagtcctgattctttttgcggtcacctaagtctggcccaggatcactagattctccctaaaatgtatacatttccctgttcctgggaggactgggaatggaaatgggaaaatgctttttggaccttgtatgtatacgcttggtcagaagcccctggctgcagtaagacatttgtgggttctgctggttctggtaaggccttaggctgtgagtggttcagaaaggtctagctccggtctggtgggcagatgtgcctgggtaactgagcaggcaggcaggtacccactcacccacctgtgagccccaccataatctgagacttcatttaaagggggcaggcagcatggtttttcttacagcattaagagtgtggattctggcatagattgcctgggttcaaatcctggcgctgccacttactggccttgtgaccttggccaacgcatttaactacaccatgcctcaggaccctcacctgtaaaacagaattatagcatctactttacgggataagagtaaaggtgctcagaaccgagtctggctcaaagtagtatcatacaggtgttagctagtgtcagtatttagggagccacacctacagtttcctggattcctctcctaaattcggctccgcccatcagctgtgtggccttgcctccgtttccttctctgctaagggaaatgacagtcactttgcatggttggattgaatgcagcaaacatgggcaaggtaactgaagcatggtggtaactgcaaaagataactggccagcatttactgatttctgtgctatgaacatcagatccattctctccgtgaggcctgctgtgcatgctgtgttgtgtaggtgctatgattatccccatttagtagaggggagacaggtagctcagagagatgagccagcttgctcaaagcctctcagctagtgagtgacagggccagggaagaaatgctagggacatttatttttttctatttttttttttttaaactggtcctctagaaagcgtggcatgattcagggcaaattctggatttcactcttggtgttcccagcatgtcgtgctttccttttacctttttttttttttttgctttatcgaggtatacctacataaagtgtactgatattctgtgtatagcccagtggatttgtacatatgtatgcacttgtgtagccaccacccagatgaagatactgagcaggtccagtaccccagagctaccttcatttctatcactttcccaagctgtcatccccgccggctgtcatgggaaccctgtctgtaagatgcgacagtttgggtaaaggagtttggtcattttaaagagtgtgaaaggcagagaacagagaaatcaaaaccttgcagggccaaggtgggtggagagggtgtttttcttttaacatacatgggcggttttaaggagaaattgaagcagcctgttcagacaattgttttggtatctggccc

SEQ ID NO: 1182 - DNA, 4042 bp, Homo sapiens
ctccctcattggctatccgccagctctcgtcctcgctcccgccttcagcctccacctccattggctcggctccctacacacccgcctcttggtctccttttagccttcgtattggctagctccaccttggcaccaccccttcgaagccgcagtgcacgctcacaagcctccccattggctcgctgcagccattgtcgtcatcccacgcgtggctctccattggctgttctctctctctagctaccgttccaccgcctacgcaacccgcgggatctcccactttttgggcctctgcgttcgttcccggctgccctcatcgcctgtagccattccacttttcccaccgcccacatgcctctctcgctcagacttccgcattagctgtctgcttctgttttcttcatcatggatttcgcaccacccccattccggcctctccattgattcctcgatcatcccgccccctacaccgcccactcccgggcatccccattggctgcgtgcttctccggctctcaattcgctgtacgtcatccgtgcatggctgcccattggccctctgcaatacttgtcttcatctcaccgcctatgcccccgtgagccgtacccctccgcgctggccttcccattggctgcccgccccttcaggccctgcccccgccggtcccgccgccggtgccgtcggtgccgccgccgccgccgatatggcgcgtacggcccctgtggagcccccgctgcggcattccgcgcccccctcgccggccgcgggtgagccccgcacctcggtcgaggcggcggtggccccgcggagggtgctgttcgccgacgaggccttggggctgccgctggcgcagttgcgccgctaccggccgtggggcgggcccggggcgggcaagatggcggcggcggccgggcaagatggcggcggcggcggcggggccgacgaggacgacgatggcgaggatggggatgaaggggaggaggaagaggaggcttgccccgagccctcaccgctgtgccccgtccccgctggcggggggttttacctggtccccacattttcgctgccgcccgcgccgggccgtctggagcgcttggggcgcgtcatggtggagctggaggcgctgctgccgcctcccggagcggtccccgggggtgccggggtgtgggtgcctgggggccgcccgccggtgctgcgcgggttggtacgcgtgctgaaccgctccttcgagaaggcggtgcacgtgcgggcctcacacgacggctgggcttccttttgcgaccacccagcgcgctacgtcccgcgcagcccgccgtgggcaggagcgggaggaacaggagcaggagatcccatcctggatccggggctcggcctgggtcccggccaggcatccgcctcctcgcccgacgacggcggccgcaccgaccgctttgccttccagctgccctttgctgagggcgcgggcgatggggcgcgcctcgacttcgtggtgcgctatgagacccctgagggcactttctgggccaacaaccacggccgcaactacacagtcctgctccggatcgcacccgctcccacacccactgatgccgaagggctgccccagcagcagcagctgccgcagctggagccacagcccgagtgccagggtcccgtggaggctgaggccaggcagctgaagagctgcatgaagccggtgaggcgcaggtaatgtcagccagcgccacctccgccaacgcagggctgtgtctgggatggaggacaagcattccggcccaggaacccctcaggcctgctctccaggacagggaggagggtgcattgagtcagtcagtcaaagagtgatggaggtcaaacacgtgctaggcactgttttaactggggttttattcctccatttattgagttccactgtaaagccctgaacaagacagacatctaccctaccctcaaggattcatacaggctcctatgggagacagtttgaaaaaacaagcaagcaagcagataggataaatagggacaaagttagctgctgaagggagtaaggggatagattgggagggaatgactgtgtcagacatgctgttaaagggagggcctttgaggaggtgagtcccgaatgatgataaagaagagttatgcagatacggtggggaggtgggggagagtttgtaggaaaaggaacagggaggacttttctgaggaggtttcatttaaactaagtcctggatgatgaataacagttatgtgcatatatggaacaagggtgttctaggtagaggaaacagcaagtgcaaagtcctggggtggaaatgagcttggtgtgaatgatcagcagtgtgctggagtggagagaactgcaatgacatagtgtggaccaagggctttgccagtggggggtagagcagattctctttctgacagagcaggaaaccaggattccagaggtggagaaactggttgaggcagtgatggcacctggctcttccagttcacccatgcctgaccttgaagcctgtgcactctactgttaacgctgtaatctacttttgagtcctgtggaggcgaggggctgagcccatgctctcacaagaaagcagtggctctagcagagagacagaaccagatgggtactggacttgaagtttttgtcccttgtttttttgccacaccacctgtgatcatttagggacagggagaaataatcagttataccccagggggccccagaagatttccctaggtttcctctatcaagctatgagttctttaagggcagcagctagtcctgattctttttgcggtcacctaagtctggcccaggatcactagattctccctaaaatgtatacatttccctgttcctgggaggactgggaatggaaatgggaaaatgctttttggaccttgtatgtatacgcttggtcagaagcccctggctgcagtaagacatttgtgggttctgctggttctggtaaggccttaggctgtgagtggttcagaaaggtctagctccggtctggtgggcagatgtgcctgggtaactgagcaggcaggcaggtacccactcacccacctgtgagccccaccataatctgagacttcatttaaagggggcaggcagcatggtttttcttacagcattaagagtgtggattctggcatagattgcctgggttcaaatcctggcgctgccacttactggccttgtgaccttggccaacgcatttaactacaccatgcctcaggaccctcacctgtaaaacagaattatagcatctactttacgggataagagtaaaggtgctcagaaccgagtctggctcaaagtagtatcatacaggtgttagctagtgtcagtatttagggagccacacctacagtttcctggattcctctcctaaattcggctccgcccatcagctgtgtggccttgcctccgtttccttctctgctaagggaaatgacagtcactttgcatggttggattgaatgcagcaaacatgggcaaggtaactgaagcatggtggtaactgcaaaagataactggccagcatttactgatttctgtgctatgaacatcagatccattctctccgtgaggcctgctgtgcatgctgtgttgtgtaggtgctatgattatccccatttagtagaggggagacaggtagctcagagagatgagccagcttgctcaaagcctctcagctagtgagtgacagggccagggaagaaatgctagggacatttatttttttctatttttttttttttaaactggtcctctagaaagcgtggcatgattcagggcaaattctggatttcactcttggtgttcccagcatgtcgtgctttccttttacctttttttttttttttgctttatcgaggtatacctacataaagtgtactgatattctgtgtatagcccagtggatttgtacatatgtatgcacttgtgtagccaccacccagatgaagatactgagcaggtccagtaccccagagctaccttcatttctatcactttcccaagct

SEQ ID NO: 1183 - DNA, 4099 bp, Homo sapiens
ggtacaaatctggtggccaagatccaccccttcacccctttgccccctttcctcccccaaccttctaagccctcgtaaaaaggagggcctctttcctcaactcagactcacccttctggaaaagcccagaatgggcctgatggcctggctttgtgaagacaagaaaaaaaaaaaaaaagaatagaaaaaaaaagaccttaaaaaaatcagccaacaacaattaaaaaaaaaaaaaaaacacccaaccctccccaccattagttcaaaacaaaactttcgctggttgaggcttctgagttggtgggacacatctgagacccaaaaatggcttgggtgtgttggacagccaggggaggcaccaaggtgggatgaggtcccctgcttggaggcctgcagggaccctgtgaacagcaggtgtttaacagatgtcacggcatgtgggagggagcaagggagggggtgaggagcatgcatgtcaggaaggagtcctggggagctgattctagtgatggccccaaggttaatgaccccttgcagtgatggtcctaaggttaatgatcccttgcactgatgttcccatagttaataaccccttgctccctgcagacttgggtcggaatgttccctacacctcctgcgtaattataaaccaggccagttctatcagcagaggcattgttccctgccccagcacctgtccccctcctggaaaagggggctagttttctctctcaggatcagaggtgtgggctgcattctccttataccttccccagaccatctgtcccttactgtcactcactccatgaaagagagtggccagagatataggaggcaaacgaagtgaggatggtggccgagaatgtgagctggccccttgggcaggcccagggtgtgagagggaaatgctacggctgctgaaagccaagatccttgcagaatgggggctggggtcaggagggcagagaggggtagaggtcgctacctcccctctatactggactatatcctctctcatggagggcttctcgggaaggagactgggagggctgggagttgggggtgagtaggcaagattaaacgggtcaggaaaagtccccagagacaggggcctctgacaaagacttgaaggagatgagggagggagccagctagatatctgaggaactccaaaggaaacagccagggcaaaggtcctgaggtgggaatgtacctgatttgttcaaggtctacaagggggctggtgtggttagtgtggagagagcaagaagagaagctggaggtgaggtcagaaaggggactcggaggttagaccacgcaggaccttgtaggccatggtaaggactttggcttcaacgctgagtgaggaggaaggcatgacagggttgcaagcagaggagaaacacaaaccgtgttaggatttaacaggaagcccctgaatgctgagtgtacaatggggtctagggcctgaatgtggaagcaggggaccagcaaggagctggctactgcagtagtctaggtgactggtgatagtgctggcagtggaggtggtgagaagaggatggatttggtaaatatttttaatagacagccaaaaggatttgttgaagactgagagtcttggagccagatcgggacagacaatgcccaaaccaggtgggcaggaaggagtccctggactatttgccagcttgaacttttaggtgagaaaaaaataaagttctgtcttgcttaagcccccattattttatgatttttctgttacttgcagctgaacatattcatttctaactcatggacatcctgaacatggagacctggggagaggggctgctggaaggatcacctccctcctaggatgctgtgaggttctaatgagataacagcatgctcagaacctggcactcagtaggtgttcagtaaatcttcccaggatggagaaggaatgtatgaatggatgtgttcagcggacaaaagctgcagttgagttcccacagaaggtgagaccccaaagggagagcgaaaggagtttactagatggaagcagcagaaggaacagcactcttgggagagggaacagtagaagcagagatggggggacagaaagaagggaggtgaggcccctgtggggtgtggagtgtcaggttgggcaagaaggacagggctttgattgtgattccattagtcagaagctacccatatgcccaatcaacttctggtagcacacagtcaggtcagtgtttgctgagctgaaatttaaaaaagtgaatccttcagaaagttaaatttcctattcggccattcattcaacaatagtatcaagtcctggagagtgcttgcggctaacaatcaggggcattcttggcttgtggcactgctcaagaaaaggttgtagttgggcagggaggacccagtaagtaactaactgcaacaggacagtcattttcactttcctagttcacacaccaaggtgtggtctaggccttcaggggctctgggtattcctggggcaatggggagtcacggagggttagggagagggtaaccccatccctgagaagcacatttttcctaatggctgcctgcgttctatggttctgctgtccggccacccaatacctcagactctgtctacacagcgtcctcctctccagcctccttattggctactcatgcctcccttcacaccacctacactgcccccgtcggctctgcttttttccccatcttgcctccaagtcctccctccgtcccgctgcactatctagcctcggcattggctcatcccatactagtactgtcctttgaggtctctacgccttcaccctggctccctcattggctatccgccagctctcgtcctcgctcccgccttcagcctccacctccattggctcggctccctacacacccgcctcttggtctccttttagccttcgtattggctagctccaccttggcaccaccccttcgaagccgcagtgcacgctcacaagcctccccattggctcgctgcagccattgtcgtcatcccacgcgtggctctccattggctgttctctctctctagctaccgttccaccgcctacgcaacccgcgggatctcccactttttgggcctctgcgttcgttcccggctgccctcatcgcctgtagccattccacttttcccaccgcccacatgcctctctcgctcagacttccgcattagctgtctgcttctgttttcttcatcatggatttcgcaccacccccattccggcctctccattgattcctcgatcatcccgccccctacaccgcccactcccgggcatccccattggctgcgtgcttctccggctctcaattcgctgtacgtcatccgtgcatggctgcccattggccctctgcaatacttgtcttcatctcaccgcctatgcccccgtgagccgtacccctccgcgctggccttcccattggctgcccgccccttcaggccctgcccccgccggtcccgccgccggtgccgtcggtgccgccgccgccgccgatatggcgcgtacggcccctgtggagcccccgctgcggcattccgcgcccccctcgccggccgcgggtgagccccgcacctcggtcgaggcggcggtggccccgcggagggtgctgttcgccgacgaggccttggggctgccgctggcgcagttgcgccgctaccggccgtggggcgggcccggggcgggcaagatggcggcggcggccgggcaagatggcggcggcggcggcggggccgacgaggacgacgatggcgaggatggggatgaaggggaggaggaagaggaggcttgccccgagccctcaccgctgtgccccgtccccgctggcggggggttttacctggtccccacattttcgctgccgcccgcgccgggccgtctggagcgcttggggcgcgtcatggtggagctggaggcgctgctgccgcctcccggagcggtccccgggggtgccggggtgtgggtgcctgggggccgcccgccggtgctgcgcgggttggtacgcgtgctgaaccgctccttcgagaaggcggtgcacgtgcgggcctcacacgacggctggg

SEQ ID NO: 1184 - DNA, 4047 bp, Homo sapiens
cctggctcccagaatctactgacagttactgaatgaggaaagagagaaaagtctcgcctcatcacgttttagggcttgagtgccctgacccagccactgtcccactgggaaggtccctagcaggtccccaatattaatgcatccatcctcacgatgaaccccagaggcccattgggaccctgaccctcttgtttcaggaacatcatggcctgatgcttctgaggccctcagcctttggggtcttttacttcaaaaagccccagtttccaaggatttaggattccaaatatccgccatcatctcagtagctgatgtttatcttgaattttccatgggtcagatacagtgctgaacatgtctcacaagtgatcatgttcaatcctcaccatggccccttgagctccatctcatcattattgtattcctgttatacagatgagggaaacggaggtataagtagtcaagcaacttgcccaagatcacagagctggcgagtgtgggtcccgctttctttggtgctgggctttgaaatccccaagctttcctgaacttgatgttctcaggttttaaattctaggatgtgatggcagggagatcctgggatttggagagtccttggagacttgaagcttgtgaggcttttaggttgtccaggaattggcggctgcatctcttgacctcagcaggcactctattcaaccactggtcagcatggtagaccagcccccaggggcttctcctgacaggccatggtgaagacttccagctcccagcaccctgcaaagcccagggttctagtcgtccaacaaccactccagccctctacaagactggcttcagacctggggaagagaaattggaaagggctttttatttacatggtacaaatctggtggccaagatccaccccttcacccctttgccccctttcctcccccaaccttctaagccctcgtaaaaaggagggcctctttcctcaactcagactcacccttctggaaaagcccagaatgggcctgatggcctggctttgtgaagacaagaaaaaaaaaaaaaaagaatagaaaaaaaaagaccttaaaaaaatcagccaacaacaattaaaaaaaaaaaaaaaacacccaaccctccccaccattagttcaaaacaaaactttcgctggttgaggcttctgagttggtgggacacatctgagacccaaaaatggcttgggtgtgttggacagccaggggaggcaccaaggtgggatgaggtcccctgcttggaggcctgcagggaccctgtgaacagcaggtgtttaacagatgtcacggcatgtgggagggagcaagggagggggtgaggagcatgcatgtcaggaaggagtcctggggagctgattctagtgatggccccaaggttaatgaccccttgcagtgatggtcctaaggttaatgatcccttgcactgatgttcccatagttaataaccccttgctccctgcagacttgggtcggaatgttccctacacctcctgcgtaattataaaccaggccagttctatcagcagaggcattgttccctgccccagcacctgtccccctcctggaaaagggggctagttttctctctcaggatcagaggtgtgggctgcattctccttataccttccccagaccatctgtcccttactgtcactcactccatgaaagagagtggccagagatataggaggcaaacgaagtgaggatggtggccgagaatgtgagctggccccttgggcaggcccagggtgtgagagggaaatgctacggctgctgaaagccaagatccttgcagaatgggggctggggtcaggagggcagagaggggtagaggtcgctacctcccctctatactggactatatcctctctcatggagggcttctcgggaaggagactgggagggctgggagttgggggtgagtaggcaagattaaacgggtcaggaaaagtccccagagacaggggcctctgacaaagacttgaaggagatgagggagggagccagctagatatctgaggaactccaaaggaaacagccagggcaaaggtcctgaggtgggaatgtacctgatttgttcaaggtctacaagggggctggtgtggttagtgtggagagagcaagaagagaagctggaggtgaggtcagaaaggggactcggaggttagaccacgcaggaccttgtaggccatggtaaggactttggcttcaacgctgagtgaggaggaaggcatgacagggttgcaagcagaggagaaacacaaaccgtgttaggatttaacaggaagcccctgaatgctgagtgtacaatggggtctagggcctgaatgtggaagcaggggaccagcaaggagctggctactgcagtagtctaggtgactggtgatagtgctggcagtggaggtggtgagaagaggatggatttggtaaatatttttaatagacagccaaaaggatttgttgaagactgagagtcttggagccagatcgggacagacaatgcccaaaccaggtgggcaggaaggagtccctggactatttgccagcttgaacttttaggtgagaaaaaaataaagttctgtcttgcttaagcccccattattttatgatttttctgttacttgcagctgaacatattcatttctaactcatggacatcctgaacatggagacctggggagaggggctgctggaaggatcacctccctcctaggatgctgtgaggttctaatgagataacagcatgctcagaacctggcactcagtaggtgttcagtaaatcttcccaggatggagaaggaatgtatgaatggatgtgttcagcggacaaaagctgcagttgagttcccacagaaggtgagaccccaaagggagagcgaaaggagtttactagatggaagcagcagaaggaacagcactcttgggagagggaacagtagaagcagagatggggggacagaaagaagggaggtgaggcccctgtggggtgtggagtgtcaggttgggcaagaaggacagggctttgattgtgattccattagtcagaagctacccatatgcccaatcaacttctggtagcacacagtcaggtcagtgtttgctgagctgaaatttaaaaaagtgaatccttcagaaagttaaatttcctattcggccattcattcaacaatagtatcaagtcctggagagtgcttgcggctaacaatcaggggcattcttggcttgtggcactgctcaagaaaaggttgtagttgggcagggaggacccagtaagtaactaactgcaacaggacagtcattttcactttcctagttcacacaccaaggtgtggtctaggccttcaggggctctgggtattcctggggcaatggggagtcacggagggttagggagagggtaaccccatccctgagaagcacatttttcctaatggctgcctgcgttctatggttctgctgtccggccacccaatacctcagactctgtctacacagcgtcctcctctccagcctccttattggctactcatgcctcccttcacaccacctacactgcccccgtcggctctgcttttttccccatcttgcctccaagtcctccctccgtcccgctgcactatctagcctcggcattggctcatcccatactagtactgtcctttgaggtctctacgccttcaccctggctccctcattggctatccgccagctctcgtcctcgctcccgccttcagcctccacctccattggctcggctccctacacacccgcctcttggtctccttttagccttcgtattggctagctccaccttggcaccaccccttcgaagccgcagtgcacgctcacaagcctccccattggctcgctgcagccattgtcgtcatcccacgcgtggctctccattggctgttctctctctctagctaccgttccaccgcctacgcaacccgcgggatctcccactttttgggcctctgcgttcgttcccggctgccctcatcgcctgtagccattccactt

SEQ ID NO: 1185 - DNA, 4052 bp, Homo sapiens
tgccagggacacccatggctgggtattgaattgtattgcaaagcaacaatcagcaaaacagtgtggccctggtataagaacagatactggggaagagaacagaatagaaagcttggacatggacccacatatggagagaactgaatttgtgatgaatgtggcatttcaaactggaggaccatggagtatggtttaacaaatgtgtctgagataattagggagaagataaagttattgagtgaatagtcagtccattatcccaacaacccctccctgcccagtttgaaatgtcaccatcatcatataccctaaaatgcccagatccattcaagatataagttttaacacctaatgctgatcttgggtttattgtgtgtcaggccttgtgctaagtatttactgtggttaaaaattttaatctaaacaaagactcctgaggaaggtactattataaccattgcagtacatatgaggaaatggaggtatggagaggttaagtgcctggctaaaaatcacacatagggcttggggtgacgctgggtttgtcccagacagtctggctccagtacccacactcttaacctctatagtaaatggaaaaaatgaagccataaaagagactagaagccaacataggtgaacatttatctcattttcaagtaggaaaggactttctaagcacaaaaccagagacagaagccacagaaaaaaagactaacctatttgactgtataaaaccatcataagcatcacaaaaaacaccataaacaaatagaaaaaaagcaaatgatgaattggggaaaatatttgctatatatgtaatggctgatgaaaggttaataaccattccaaataaagagctgtggcaaatcaataagggaaaaataagatgaacaccctattaggagtaaggacatgaccagacaaccaaaaaaaaaaaaaaaaaaaagcatgaatggccaatgaatagtaaaagtaatcacaagatgcaaatttcaacaatgtgataatgtgtttttcttacctgtcatgttgggaaataattaaaacataataatactcacctagggttagcttaagtagagggagcataaaataggacaaccttttggaaggagaattagcagagagggtcataaactttaaaaatgcacgccccctttgccccagcaactcccttttcaggaatccaaggaagcagtcagggatgtttatagaaaaaaacgagaaacaaccggaatgtccaacaatcggcacttggtcaaatcaatcaaagttcatgctgatgtgaggacagtcttgtccatcatgaaagatcatgtgttcaaacaatttttagtaagcttcaaaaacactactgttaattgaataaagcaggaacaaaaccaatatatagcatgattctaatttggttacagaaatactaatagctaacacttcgtgagcacttactttgtgccaaacgctgtgctaagcctgcagaatcgagctcaccccagccctgaacaacctgtttgcttcctgaatatggactctggtcacacacatgcagtcctggggtaggtccacacagctaaactacggttgacaatggtgtgaagtgctccctgcccccccgccccaagggtctcctctaaagcgatacaagcaaagttcagttaagtgctcagcttgccccggcaccttgcaatcctcctgctactagggtgaacagaactgatgctcactctcataaaatgtaaaggtcctcggcgacattactattattaaacgccagctgtgtacaaagctctaggctggatgctggctgggaaggcaggtgggggaaggcaagaaaagagagcgggagagatggaggaaaggagatcgatggagtgtggtcaagatggaggagacagagataggggagatggtcagaggccaggagagatgcggggaaagagagtctgagtgtagcgacagacagatggcgggagaaagagaggcagagaaacatgtaaaagagcaagacagggtgagcagagagacagagaaggatgagaggcatcaagagctaagagacaaagagatgagagagatgcagttgaaattttcagttgcacctggacagcatttcaagttgttcaaagctctgaaatccataaagactggcagctgacatattttaaaaatcctatccatctacgtatcaattgatgaattcatttatttttgcccctgcccatgcattaagtacttcacctttaagtcttctgccatttattctattattatttttttaaagaccttacctggctggaatcacggtagctgggtacatcccactgtaccagagggcccctgacccccccgccgtgcctacctccctgccatctcctccaatggggcccacatctggtaggggagagcagggacactcaccttggtgaagtggactgacagaaaaggatcagcctggcttgtgggaaactgtcacgtatcaaaaacaactttgcttttataccgagaagaaaaaccacgctgtacggtgtggaagccgcagacctctctcttctaataatccaaatttttttcgatgagtgtgtgcgctgataatcacggggtgggggggggttctcatagttttttttttctctctctctgtgtttctccttttcttgattatgagacttaaacggaaattttgaaattttgggtttttttctttgccctttacgagtcatctgaaaatatgatttcttcccctcaccacagaggtgagaggtatcaatgagataatagggctcatgagaaaccacagtttttaaaacaaaagtgtatagagtttgaaaaaaaaaaaacaagggaaaagaactaaaataaatcacagggccaacccgaggcaggcagagacaccattctgtgagtgagaggatatttgagggtctctggggaaagaaagagaatctgaagctctatgtgtggatgggaaatgccagggaaagagacagaatagggctgggttcccagaggcctcgccctactccaggcctcagtttccctatagatggaattgatatggtccccattgcttgaactacccggcgaggggagttctgcaccccctgcaacacccctcccacagagggtgaggggcatgtaagttacttcatggaggagaaagcggagagcccactgtcatcccctaaaattcatggacttgaagagtcggagaatccctggctcccagaatctactgacagttactgaatgaggaaagagagaaaagtctcgcctcatcacgttttagggcttgagtgccctgacccagccactgtcccactgggaaggtccctagcaggtccccaatattaatgcatccatcctcacgatgaaccccagaggcccattgggaccctgaccctcttgtttcaggaacatcatggcctgatgcttctgaggccctcagcctttggggtcttttacttcaaaaagccccagtttccaaggatttaggattccaaatatccgccatcatctcagtagctgatgtttatcttgaattttccatgggtcagatacagtgctgaacatgtctcacaagtgatcatgttcaatcctcaccatggccccttgagctccatctcatcattattgtattcctgttatacagatgagggaaacggaggtataagtagtcaagcaacttgcccaagatcacagagctggcgagtgtgggtcccgctttctttggtgctgggctttgaaatccccaagctttcctgaacttgatgttctcaggttttaaattctaggatgtgatggcagggagatcctgggatttggagagtccttggagacttgaagcttgtgaggcttttaggttgtccaggaattggcggctgcatctcttgacctcagcaggcactctattcaaccactggtcagcatggtagaccagcccccaggggcttctcctgacaggccatggtgaagacttccagctcccagcaccctgcaaagcccagggttctagtcgtccaacaaccactccagccctctacaagactggc

SEQ ID NO: 1186 - DNA, 4024 bp, Homo sapiens
ggcttagaacattactgcgtgagaaacaggagtgtgggtctgtggaggctccgaacaagggcctgggagagcactggtgagatgagaaggtgagtgaatgaatgaagccagagatggggtgatgctccttcaagccaagaaataacaaagattgccagcaaccaccagaagctgggggagaggcctggagcagcttctcccttatggcccccagaaggaaccaaccctggcaacaccttgatcttggactctggcctccagaactgtgagatgatcaatttctgttgctgaagccactcagttgtggtactttgttatagcagccagaacaaactaataccgatttcggtgcaaatggatgttttccaccactctggcctggcccatgtggctggcctgtggtcacttctgaagctgcctggacacttggccagagctaagaattctccccaaacacatgtgggatggcctgactcagcaaagcatagatacattctcagacagggacatggagatgatctgtctgggggtagaggacctagagggccgggctgggcagccggcttcctgcactgtctgttgggacgtccctttctgactgggtttctcagaagctgaatgggggatgtttctgggacacagattatgttttcatatcggggtctgcatctgggccctgttgtcacagcccccgacttgcccagatttttccgccattgacgtcatggcggccggatgcgccgggcttcatcgacaccacggaggaagagaagagggcagataccccaccccacaggtttcgttccgagaactggctgccctgtcctgcagcaggcttggcccaggtggggtgacatgggtgctggtggatgtggtaggtgatgtccatctggccactatgacaagcccctagctctgaagacctggcccttcttgggttgtggagaggacccaggtttgaagctctgagagtgccaggcaggctccacagatactgggacccctggggtcttcaaatagtataacaccaggacctcagaatcatagaacagcatttcttagatttaaaggatcctagaatctcaaaaccacagactgtggggtctacggtcccaaagtctcagtatgtgtaggccagtgtccctggtgtccaaactccttggaaccatctgaaagtcaggcagcttgctgcttcatagggcctcttgcctaccaggcctggaaacagagccagcctccctagggcctcagtctccctgtccactctggaacaacgttcccaaatacatggccactccgccagagatggcaacagggggaggaggaggttgaggctggtgtgcctttggtctgggcctcatggggggagctggaaaagcctcagccttcgccaatacagagcccatcatcagactctctagaggggccccacaatcaaggttttcggggaccagcaccagctctggggacacacagcctgactgactgacatgcctccatcatcaccacgctctggccaactaggcctcctgacctatggagtccggggcctcacctagcccagctcttgtgaggctgggccccacactgtgatcgtggatcgtccaacctgtgggaagttggggtccaacgtgtgagaaggcagaagggggaatggtagcccaggttccccttcccccttctgggtgctgaggggtaaactgaggccttcagttggggagagagccagaaccagggtcccacctagagtcctgagatctaggcttggatttcaactctgccgctgcatttcggtgaggccctgagatctctggtcttcaatttgcccttctacactgagcacggagaggcgtggagtagacaagggccagggcccttctacgctgtctggttaagtcattaggtgtctgcagggcttcaagttgacaattgcccctctatccaggggactggctgagagatagggatacatagagacaaagagacacacacaaagagcgagcaagagagaacaagagatagtgagagacattgagagaaatggacacatgcatggagagccagagtgcatgtgtgcgagaggaggattgcctcaaataagaacatttgctggtctctggctggttcaactgatgctgcctgaaataatcaagaataaagaagggcaaggtgccagggacacccatggctgggtattgaattgtattgcaaagcaacaatcagcaaaacagtgtggccctggtataagaacagatactggggaagagaacagaatagaaagcttggacatggacccacatatggagagaactgaatttgtgatgaatgtggcatttcaaactggaggaccatggagtatggtttaacaaatgtgtctgagataattagggagaagataaagttattgagtgaatagtcagtccattatcccaacaacccctccctgcccagtttgaaatgtcaccatcatcatataccctaaaatgcccagatccattcaagatataagttttaacacctaatgctgatcttgggtttattgtgtgtcaggccttgtgctaagtatttactgtggttaaaaattttaatctaaacaaagactcctgaggaaggtactattataaccattgcagtacatatgaggaaatggaggtatggagaggttaagtgcctggctaaaaatcacacatagggcttggggtgacgctgggtttgtcccagacagtctggctccagtacccacactcttaacctctatagtaaatggaaaaaatgaagccataaaagagactagaagccaacataggtgaacatttatctcattttcaagtaggaaaggactttctaagcacaaaaccagagacagaagccacagaaaaaaagactaacctatttgactgtataaaaccatcataagcatcacaaaaaacaccataaacaaatagaaaaaaagcaaatgatgaattggggaaaatatttgctatatatgtaatggctgatgaaaggttaataaccattccaaataaagagctgtggcaaatcaataagggaaaaataagatgaacaccctattaggagtaaggacatgaccagacaaccaaaaaaaaaaaaaaaaaaaagcatgaatggccaatgaatagtaaaagtaatcacaagatgcaaatttcaacaatgtgataatgtgtttttcttacctgtcatgttgggaaataattaaaacataataatactcacctagggttagcttaagtagagggagcataaaataggacaaccttttggaaggagaattagcagagagggtcataaactttaaaaatgcacgccccctttgccccagcaactcccttttcaggaatccaaggaagcagtcagggatgtttatagaaaaaaacgagaaacaaccggaatgtccaacaatcggcacttggtcaaatcaatcaaagttcatgctgatgtgaggacagtcttgtccatcatgaaagatcatgtgttcaaacaatttttagtaagcttcaaaaacactactgttaattgaataaagcaggaacaaaaccaatatatagcatgattctaatttggttacagaaatactaatagctaacacttcgtgagcacttactttgtgccaaacgctgtgctaagcctgcagaatcgagctcaccccagccctgaacaacctgtttgcttcctgaatatggactctggtcacacacatgcagtcctggggtaggtccacacagctaaactacggttgacaatggtgtgaagtgctccctgcccccccgccccaagggtctcctctaaagcgatacaagcaaagttcagttaagtgctcagcttgccccggcaccttgcaatcctcctgctactagggtgaacagaactgatgctcactctcataaaatgtaaaggtcctcggcgacattactattattaaacgccagctgtgtacaaagctctaggctggatgctggctgggaaggcaggtgggggaaggcaagaaaagagagcgggagagatg

SEQ ID NO: 1187 - DNA, 4033 bp, Homo sapiens
gctgacattttgactagctttgtaaagctctgtggttttgtgattttgacattctgcatctttaaggttctgcacctgacgttttttggagggtggagtttccaagcctctgagacctgacacctttgacccccagagtactgcaattcagaatagcctacactgctcacagccaaggatctggggacttgggggttctgtgaagccatggggtacgggctgaggtgttaccaggtgggaggccaggccgggccttgagggagaagaccccagtggcggtggtgggtggtgtgaggctgatcatggctgggctctccagggggtgcacctgcagcacaggggtccgggcgtgggcatccaccgttgagagctggggggcacatgtgggctgtggttcagcctgactcggggcccctccccacagttctcccacctgctccctcctccctgcccattcaccgtccatacctggtgcatgaaatgtggcctgtcctggaggagtgcctgtaagtggggcaaggggcccagccgtgccccggagggtgccaccatgactaggggcagtgtgggcagctgggcagaaaggcaggtgggtgagaggccatcctgatcctcactgttctgtgtctaattcaaatactctgcactgcaagcccacatggtagatgctatgatcatcccccttttacacgtatggaaactgaggctcatggagatcgagtaactttttaaagatcaaacagctaataagttgcagagctggcctcagccctgtcacctcacctacttggccccagtcctcttctcttgtcacatggggatggggacacatagctatgctcatgggactacaatacggcctcctcctctcctgagacagggattgggaggtcggggagagcctccaatctctgaggcctggcaggtggggattttcttggccctgcaacatctgcataagtcacagacttgcctgggacccagaaaccacttcctgtgccccagccagcccccctcccgcccagtgccacagtaaaggtcggcacctgtaggtccaggtaccccaccctgcctgccccatcctgggcccagggcctcacctgcagctgcgatggtggcatggggttcaaggaagaagaggaggcatgggccccgcctcgaagatctcggccctggaaggttccccctgggccccgggcccccagcaggtctgaggctttgggtgcagccctccagctgggcgaggctcctggggatgggccaagggccaaggaaggggccgagggcttgccaggcctggggttgggcatcgggtccttgtccaagggcaggctgcgtagacaataggggaaaggagtcacacgtgtgctagggcggtatgagatactcgaccacctgagccacgtggacactcctctggtcaaagcaggcattggctgggacatgtcccgaggggccccatagttgcaccccagctctagacacacacacacacacacacacacacacacaccaagaacacaggtacatgtacatacccacacatgccccacgtgcagaggtccagcacctggcttgcctgcccacgctagcacagccctggtgtggatgtgtcctctatgagggcaatggttgtttccccctccacttgagagctgtttcaagcctcaggcctctagccctccctgcaccctgcacaggctgtgtttgctcatcttgccggagctggtctcggactttctcctcggagtcctattttgccccagtgactaggcatggactcaaaagattcatctggctgctgtgagtggggctagtgaggaggctattgtaacagtcctggcaagtgatgatgctggcacagaatgggctggtggcagtggagaaggcgagaagtgggtagattctgagacttaatctgaagctggatcaggagcagtgctagcagcttggatgtagtgggcaagagggagagtcaaagtgacatgggttttagcttgagcagctggaaggaccgagctgacattacctgagatgggggacatggcggggagttggattgggtgcaaaagtgcaggtgtagatagacatgaagagtctggcattaaatatgtgagtggaggagctgagggggcagctgaatacgggggtctggatctcagggcaaggaggcgagtccaggagtgtgatcatgcacggatccagcatggcaagtgacagagaggaggagagatggggtctcttgagctggggcctgtagaagcttctctacccagcccccatcagagttcaccccaatttctggccctcaagcctggctcatgctacaccccctgcctcaaatgcccactccttctcctctttccctgtccaagccacgcaagacctgctcttctattgtcctcaccttgaaagccctccacaatggctccgggccccctgctgagccccagaaccttccactccctgagggaagcactggcttttcaggatcctataatcctggtctgagaggaagccagagctggaagggactgcccagccaaccccattatacagaaggggatgctcagatgccgagttccgtagtcccatagtgacttgagaactccacttctttctttaggaagtgtttccgtgtgcacattttataaactctctggtgtgtgtgtgtgtgtgtctccatctccccgttccacctcacagcactgagttgggcacacagctgctgagagcagcccgggggagtatagaagggttctgggggagcagttgctccttcctttctttgctgtcacctcctgggggtggttgtcagagctgtggtgctgagggagatgagtgtgagaatccaggtattaagttcttagtctcctgggggcttagaacattactgcgtgagaaacaggagtgtgggtctgtggaggctccgaacaagggcctgggagagcactggtgagatgagaaggtgagtgaatgaatgaagccagagatggggtgatgctccttcaagccaagaaataacaaagattgccagcaaccaccagaagctgggggagaggcctggagcagcttctcccttatggcccccagaaggaaccaaccctggcaacaccttgatcttggactctggcctccagaactgtgagatgatcaatttctgttgctgaagccactcagttgtggtactttgttatagcagccagaacaaactaataccgatttcggtgcaaatggatgttttccaccactctggcctggcccatgtggctggcctgtggtcacttctgaagctgcctggacacttggccagagctaagaattctccccaaacacatgtgggatggcctgactcagcaaagcatagatacattctcagacagggacatggagatgatctgtctgggggtagaggacctagagggccgggctgggcagccggcttcctgcactgtctgttgggacgtccctttctgactgggtttctcagaagctgaatgggggatgtttctgggacacagattatgttttcatatcggggtctgcatctgggccctgttgtcacagcccccgacttgcccagatttttccgccattgacgtcatggcggccggatgcgccgggcttcatcgacaccacggaggaagagaagagggcagataccccaccccacaggtttcgttccgagaactggctgccctgtcctgcagcaggcttggcccaggtggggtgacatgggtgctggtggatgtggtaggtgatgtccatctggccactatgacaagcccctagctctgaagacctggcccttcttgggttgtggagaggacccaggtttgaagctctgagagtgccaggcaggctccacagatactgggacccctggggtcttcaaatagtataacaccaggacctcagaatcatagaacagcatttcttagatttaaaggatcctagaatctcaaaaccacagactgtggggtctacggtcccaaagtctcagtatgtgtaggccagtgtccctggtgtccaa

SEQ ID NO: 1188 - DNA, 4049 bp, Homo sapiens
gcacaggtgcggatgtcgtatgtggccactgatgctgggaccatgaactggggttgaatagggctctttaccacccaactgtgaccttgggaaagtcacctaaacccccctggcctcaatattcctcatctgtacattcgcatcatgagaaataaattaccaccagcaaagcgctcagaaacagtgcctggcctccagggctggcttcatgggcgtgtgacctatgtggttatgtggcaccctgtgctttgtttaatgctctgtggtcgccatcttgaaatctgaacaaggggccctgcaggttacatagctggtcctgctggcacacagcctgcatctggcaagtctggctatttgcatttgctttaacaactcaggatcacagtgtttggggatcttagagtcagagggttttttttttttttttttcttgagacggagtcttgatctgtcgcctaggctggagtgcagtggtatgatctcagctcactgcaaactccgcctcccaggttcaagcaattctctgcctcagcctcccaagtagttgggactacagacacctgccaccacgcctggctaattttttgtacttttagtagacacagggtttcaccatcttggcgaggctggtcttgaactcctgacctcgtgatccacccgcctcggcctcccaaagtgctgggattacaggcgtgagccaccacgcccagccggggtcagagggtttgtaagtagaaggggacagatttccaggtctgggcatgtttggagctggggacaggggcccctagctctcaggacctgaatgtgaggttaggttccctgcaccgtgcagacctcctccctgccccccagcagtctgagtctgccaccaccagtcctggggtcgctcaccacagatgaagccttggtcagtgccattttcccagccaggtgggcctgcatggcactcagcttctccttctccagcaccagctgtgaaatggcacaaacatgaggcctcagcctggcccttctctgccacatctttgcccaggctacggtcttccctgggagtgcccgctcctcttccttcctttataccagccctcgtcccaggtgaacttggtttctggcacatggtggacagaaggttttgcgcactatccctatcccttaccctccaccgccctggcattacctgctgctccagagactgtaccatctctctctggaggagacattgtgccctgcccttctcatccagaagatggtccgcctggcagtgcctaagtagggagaagattccatgcaggtgaccacgacaggcctggtctggctcaatgctctgaatggggagggcccagaccctctgggagttctctcctctgagccccagctcccctcccctctctacctcagtctccctctcacacccctcgttcccttaacacatgcccctcagcacctactgcatgtcaggcctgaactcaccacttgagcctggccagagtgctggagataatgttggaagtgtggtgagttgagaatgggccagggaggtgagagtgggcaaagcattctgggtggagggacggcctgtgcaaaggcctggctgcaaggaggacaggacatgtggggttgctgctaagggttgtgtgtagtgtggtgtgtatttgtgtgtgtgtgtgtgtgagagagagagaaagagagagagagagagagagagagagagagagagagagagagagagagagacatatggggggactgaggggaggcagcagcagccatctagaggagctagaactttgggaacagtggaataaggctggcatgttggcatgaggagtagcagggcaaagcaggagtgcagattctagagcctggctacatgggttcaaatcccagctctgtcactcaggaactgggagattttgatcaagacacttaacctctttggcctcagtctccttgtctgtaaaatgggggtaaataacagcacaaacgtttcttattatacatacgagaaaactgaggtcgagagaagctaagtaatttgtccaaggtcacacagccagtcagggatggagctgggatttgaacccacagtctcagagtttagctcttgcatcttactacttattgggatgaagcctgagctgagatctgcaccctagacctctccccacaagccagggccggtagactggcacaggcctgggccactcacttgaggaagtcctctggctcttcgaagaccttctcacatccgggccacttgcagacaccatttgccagcagtgggtaggagctctggggcacagccgaaagggtgctggggggacagagggtgtcaggggaggggataggagggcgaggatccttcccagccctgtccactgacctgtccttcctgggtgcactgggatttgggaaggtgcagagcagtgccggctccctggacacccattccaggctggccacgttgatccctgtgggtggggacagggcacctatggaggctgtgggctgggctctggagcttggcccacaaggcctctcattttgagcttcccaccctcctgagcctcgaaaaccctgactcccagggggctctgctgtccccaaagtcccaggcttctggcagagaagcttaaagacggccattcgcaggtgctgacattttgactagctttgtaaagctctgtggttttgtgattttgacattctgcatctttaaggttctgcacctgacgttttttggagggtggagtttccaagcctctgagacctgacacctttgacccccagagtactgcaattcagaatagcctacactgctcacagccaaggatctggggacttgggggttctgtgaagccatggggtacgggctgaggtgttaccaggtgggaggccaggccgggccttgagggagaagaccccagtggcggtggtgggtggtgtgaggctgatcatggctgggctctccagggggtgcacctgcagcacaggggtccgggcgtgggcatccaccgttgagagctggggggcacatgtgggctgtggttcagcctgactcggggcccctccccacagttctcccacctgctccctcctccctgcccattcaccgtccatacctggtgcatgaaatgtggcctgtcctggaggagtgcctgtaagtggggcaaggggcccagccgtgccccggagggtgccaccatgactaggggcagtgtgggcagctgggcagaaaggcaggtgggtgagaggccatcctgatcctcactgttctgtgtctaattcaaatactctgcactgcaagcccacatggtagatgctatgatcatcccccttttacacgtatggaaactgaggctcatggagatcgagtaactttttaaagatcaaacagctaataagttgcagagctggcctcagccctgtcacctcacctacttggccccagtcctcttctcttgtcacatggggatggggacacatagctatgctcatgggactacaatacggcctcctcctctcctgagacagggattgggaggtcggggagagcctccaatctctgaggcctggcaggtggggattttcttggccctgcaacatctgcataagtcacagacttgcctgggacccagaaaccacttcctgtgccccagccagcccccctcccgcccagtgccacagtaaaggtcggcacctgtaggtccaggtaccccaccctgcctgccccatcctgggcccagggcctcacctgcagctgcgatggtggcatggggttcaaggaagaagaggaggcatgggccccgcctcgaagatctcggccctggaaggttccccctgggccccgggcccccagcaggtctgaggctttgggtgcagccctccagctgggcgaggctcctggggatgggccaagggccaaggaaggggccgagggcttgccaggcctggggttgggcatcgggtccttgtccaagggcaggctgcgtagacaataggggaaaggagtcacacgtgtgctagggcggtatgagatactcgac

SEQ ID NO: 1189 - DNA, 4043 bp, Homo sapiens
attacaggcatgagccactgcgcctggctccactttatttttaaatcagtgtttttcaaagcaaggacgccctcttctaaattccagtctgaggtggaatcccacaaaacagcatgagccgtatttattagagcacaggtgcggatgtcgtatgtggccactgatgctgggaccatgaactggggttgaatagggctctttaccacccaactgtgaccttgggaaagtcacctaaacccccctggcctcaatattcctcatctgtacattcgcatcatgagaaataaattaccaccagcaaagcgctcagaaacagtgcctggcctccagggctggcttcatgggcgtgtgacctatgtggttatgtggcaccctgtgctttgtttaatgctctgtggtcgccatcttgaaatctgaacaaggggccctgcaggttacatagctggtcctgctggcacacagcctgcatctggcaagtctggctatttgcatttgctttaacaactcaggatcacagtgtttggggatcttagagtcagagggttttttttttttttttttcttgagacggagtcttgatctgtcgcctaggctggagtgcagtggtatgatctcagctcactgcaaactccgcctcccaggttcaagcaattctctgcctcagcctcccaagtagttgggactacagacacctgccaccacgcctggctaattttttgtacttttagtagacacagggtttcaccatcttggcgaggctggtcttgaactcctgacctcgtgatccacccgcctcggcctcccaaagtgctgggattacaggcgtgagccaccacgcccagccggggtcagagggtttgtaagtagaaggggacagatttccaggtctgggcatgtttggagctggggacaggggcccctagctctcaggacctgaatgtgaggttaggttccctgcaccgtgcagacctcctccctgccccccagcagtctgagtctgccaccaccagtcctggggtcgctcaccacagatgaagccttggtcagtgccattttcccagccaggtgggcctgcatggcactcagcttctccttctccagcaccagctgtgaaatggcacaaacatgaggcctcagcctggcccttctctgccacatctttgcccaggctacggtcttccctgggagtgcccgctcctcttccttcctttataccagccctcgtcccaggtgaacttggtttctggcacatggtggacagaaggttttgcgcactatccctatcccttaccctccaccgccctggcattacctgctgctccagagactgtaccatctctctctggaggagacattgtgccctgcccttctcatccagaagatggtccgcctggcagtgcctaagtagggagaagattccatgcaggtgaccacgacaggcctggtctggctcaatgctctgaatggggagggcccagaccctctgggagttctctcctctgagccccagctcccctcccctctctacctcagtctccctctcacacccctcgttcccttaacacatgcccctcagcacctactgcatgtcaggcctgaactcaccacttgagcctggccagagtgctggagataatgttggaagtgtggtgagttgagaatgggccagggaggtgagagtgggcaaagcattctgggtggagggacggcctgtgcaaaggcctggctgcaaggaggacaggacatgtggggttgctgctaagggttgtgtgtagtgtggtgtgtatttgtgtgtgtgtgtgtgtgagagagagagaaagagagagagagagagagagagagagagagagagagagagagagagagagacatatggggggactgaggggaggcagcagcagccatctagaggagctagaactttgggaacagtggaataaggctggcatgttggcatgaggagtagcagggcaaagcaggagtgcagattctagagcctggctacatgggttcaaatcccagctctgtcactcaggaactgggagattttgatcaagacacttaacctctttggcctcagtctccttgtctgtaaaatgggggtaaataacagcacaaacgtttcttattatacatacgagaaaactgaggtcgagagaagctaagtaatttgtccaaggtcacacagccagtcagggatggagctgggatttgaacccacagtctcagagtttagctcttgcatcttactacttattgggatgaagcctgagctgagatctgcaccctagacctctccccacaagccagggccggtagactggcacaggcctgggccactcacttgaggaagtcctctggctcttcgaagaccttctcacatccgggccacttgcagacaccatttgccagcagtgggtaggagctctggggcacagccgaaagggtgctggggggacagagggtgtcaggggaggggataggagggcgaggatccttcccagccctgtccactgacctgtccttcctgggtgcactgggatttgggaaggtgcagagcagtgccggctccctggacacccattccaggctggccacgttgatccctgtgggtggggacagggcacctatggaggctgtgggctgggctctggagcttggcccacaaggcctctcattttgagcttcccaccctcctgagcctcgaaaaccctgactcccagggggctctgctgtccccaaagtcccaggcttctggcagagaagcttaaagacggccattcgcaggtgctgacattttgactagctttgtaaagctctgtggttttgtgattttgacattctgcatctttaaggttctgcacctgacgttttttggagggtggagtttccaagcctctgagacctgacacctttgacccccagagtactgcaattcagaatagcctacactgctcacagccaaggatctggggacttgggggttctgtgaagccatggggtacgggctgaggtgttaccaggtgggaggccaggccgggccttgagggagaagaccccagtggcggtggtgggtggtgtgaggctgatcatggctgggctctccagggggtgcacctgcagcacaggggtccgggcgtgggcatccaccgttgagagctggggggcacatgtgggctgtggttcagcctgactcggggcccctccccacagttctcccacctgctccctcctccctgcccattcaccgtccatacctggtgcatgaaatgtggcctgtcctggaggagtgcctgtaagtggggcaaggggcccagccgtgccccggagggtgccaccatgactaggggcagtgtgggcagctgggcagaaaggcaggtgggtgagaggccatcctgatcctcactgttctgtgtctaattcaaatactctgcactgcaagcccacatggtagatgctatgatcatcccccttttacacgtatggaaactgaggctcatggagatcgagtaactttttaaagatcaaacagctaataagttgcagagctggcctcagccctgtcacctcacctacttggccccagtcctcttctcttgtcacatggggatggggacacatagctatgctcatgggactacaatacggcctcctcctctcctgagacagggattgggaggtcggggagagcctccaatctctgaggcctggcaggtggggattttcttggccctgcaacatctgcataagtcacagacttgcctgggacccagaaaccacttcctgtgccccagccagcccccctcccgcccagtgccacagtaaaggtcggcacctgtaggtccaggtaccccaccctgcctgccccatcctgggcccagggcctcacctgcagctgcgatggtggcatggggttcaaggaagaagaggaggcatgggccccgcctcgaagatctcggccctggaaggttccccctgggccccgggcccccagcaggtctgaggctttgggtgcagccctccagctgggcgaggctcctggg

SEQ ID NO: 1190 - DNA, 4080 bp, Homo sapiens
gctggagtgcagtggtgcaatctcggctcactgcaacccccacctcccagattcaagcaagtcttctgcctcagcctcccgagtagctgggactacaggtgcccgtcactacgcccagctaatttttgtatttttggtagagatggggtttcaccatgttagccaggctggtctcgaactcctgacctcatgtgatccacccgcttcagcctcccaaagtgctgggattacaggcatgagccactgcgcctggctccactttatttttaaatcagtgtttttcaaagcaaggacgccctcttctaaattccagtctgaggtggaatcccacaaaacagcatgagccgtatttattagagcacaggtgcggatgtcgtatgtggccactgatgctgggaccatgaactggggttgaatagggctctttaccacccaactgtgaccttgggaaagtcacctaaacccccctggcctcaatattcctcatctgtacattcgcatcatgagaaataaattaccaccagcaaagcgctcagaaacagtgcctggcctccagggctggcttcatgggcgtgtgacctatgtggttatgtggcaccctgtgctttgtttaatgctctgtggtcgccatcttgaaatctgaacaaggggccctgcaggttacatagctggtcctgctggcacacagcctgcatctggcaagtctggctatttgcatttgctttaacaactcaggatcacagtgtttggggatcttagagtcagagggttttttttttttttttttcttgagacggagtcttgatctgtcgcctaggctggagtgcagtggtatgatctcagctcactgcaaactccgcctcccaggttcaagcaattctctgcctcagcctcccaagtagttgggactacagacacctgccaccacgcctggctaattttttgtacttttagtagacacagggtttcaccatcttggcgaggctggtcttgaactcctgacctcgtgatccacccgcctcggcctcccaaagtgctgggattacaggcgtgagccaccacgcccagccggggtcagagggtttgtaagtagaaggggacagatttccaggtctgggcatgtttggagctggggacaggggcccctagctctcaggacctgaatgtgaggttaggttccctgcaccgtgcagacctcctccctgccccccagcagtctgagtctgccaccaccagtcctggggtcgctcaccacagatgaagccttggtcagtgccattttcccagccaggtgggcctgcatggcactcagcttctccttctccagcaccagctgtgaaatggcacaaacatgaggcctcagcctggcccttctctgccacatctttgcccaggctacggtcttccctgggagtgcccgctcctcttccttcctttataccagccctcgtcccaggtgaacttggtttctggcacatggtggacagaaggttttgcgcactatccctatcccttaccctccaccgccctggcattacctgctgctccagagactgtaccatctctctctggaggagacattgtgccctgcccttctcatccagaagatggtccgcctggcagtgcctaagtagggagaagattccatgcaggtgaccacgacaggcctggtctggctcaatgctctgaatggggagggcccagaccctctgggagttctctcctctgagccccagctcccctcccctctctacctcagtctccctctcacacccctcgttcccttaacacatgcccctcagcacctactgcatgtcaggcctgaactcaccacttgagcctggccagagtgctggagataatgttggaagtgtggtgagttgagaatgggccagggaggtgagagtgggcaaagcattctgggtggagggacggcctgtgcaaaggcctggctgcaaggaggacaggacatgtggggttgctgctaagggttgtgtgtagtgtggtgtgtatttgtgtgtgtgtgtgtgtgagagagagagaaagagagagagagagagagagagagagagagagagagagagagagagagagacatatggggggactgaggggaggcagcagcagccatctagaggagctagaactttgggaacagtggaataaggctggcatgttggcatgaggagtagcagggcaaagcaggagtgcagattctagagcctggctacatgggttcaaatcccagctctgtcactcaggaactgggagattttgatcaagacacttaacctctttggcctcagtctccttgtctgtaaaatgggggtaaataacagcacaaacgtttcttattatacatacgagaaaactgaggtcgagagaagctaagtaatttgtccaaggtcacacagccagtcagggatggagctgggatttgaacccacagtctcagagtttagctcttgcatcttactacttattgggatgaagcctgagctgagatctgcaccctagacctctccccacaagccagggccggtagactggcacaggcctgggccactcacttgaggaagtcctctggctcttcgaagaccttctcacatccgggccacttgcagacaccatttgccagcagtgggtaggagctctggggcacagccgaaagggtgctggggggacagagggtgtcaggggaggggataggagggcgaggatccttcccagccctgtccactgacctgtccttcctgggtgcactgggatttgggaaggtgcagagcagtgccggctccctggacacccattccaggctggccacgttgatccctgtgggtggggacagggcacctatggaggctgtgggctgggctctggagcttggcccacaaggcctctcattttgagcttcccaccctcctgagcctcgaaaaccctgactcccagggggctctgctgtccccaaagtcccaggcttctggcagagaagcttaaagacggccattcgcaggtgctgacattttgactagctttgtaaagctctgtggttttgtgattttgacattctgcatctttaaggttctgcacctgacgttttttggagggtggagtttccaagcctctgagacctgacacctttgacccccagagtactgcaattcagaatagcctacactgctcacagccaaggatctggggacttgggggttctgtgaagccatggggtacgggctgaggtgttaccaggtgggaggccaggccgggccttgagggagaagaccccagtggcggtggtgggtggtgtgaggctgatcatggctgggctctccagggggtgcacctgcagcacaggggtccgggcgtgggcatccaccgttgagagctggggggcacatgtgggctgtggttcagcctgactcggggcccctccccacagttctcccacctgctccctcctccctgcccattcaccgtccatacctggtgcatgaaatgtggcctgtcctggaggagtgcctgtaagtggggcaaggggcccagccgtgccccggagggtgccaccatgactaggggcagtgtgggcagctgggcagaaaggcaggtgggtgagaggccatcctgatcctcactgttctgtgtctaattcaaatactctgcactgcaagcccacatggtagatgctatgatcatcccccttttacacgtatggaaactgaggctcatggagatcgagtaactttttaaagatcaaacagctaataagttgcagagctggcctcagccctgtcacctcacctacttggccccagtcctcttctcttgtcacatggggatggggacacatagctatgctcatgggactacaatacggcctcctcctctcctgagacagggattgggaggtcggggagagcctccaatctctgaggcctggcaggtggggattttcttggccctgcaacatctgcataagtcacagacttgcctgggacccagaaaccacttcctgtgccccagccagcccccctcccgcccagtgccacagtaaaggtcggcacctgtaggtccaggtacccc

SEQ ID NO: 1191 - DNA, 4053 bp, Homo sapiens
acccctgacacagtgacacagtccctgtctggtacacatgaggaccctccactgctagccagcctgccccaggcaggggctcatggctgccatggtgtctgccagatcttgtctgatacgaaggagcttcagaaggaaatcaactccctatctgggaagctggaccggacgtttgcggtgactgatgagcttgtgttcaaggtgtggggcaggttgggcgggggtgagtggggtgaggctgggctgctgccttgtgcatctgctaattggctggctggggtccagacccaggccctgtgcgaggctggaggtgcactgatacccagggctggctttgtttcatggaggatgaagctagtggggtggtgggagagggtggccttcttagggcatggagatggtcaagggcagcccactgatacctttgaggtccctgtgtctggtcaggatgccaagaaggacgatgctgttcggaaggcctataagtatctagctgctctgcacgaggtgaggggagacatgtgcctggggtggggctgctgggggtgggtgggactgggtgcaagccttctgctcctgttgtccccagaactgcagccagctcatccagaccatcgaggacacaggcaccatcatgcgggaggttcgagacctcgaggagcaggtgaggcctgggggcaggatggggagccaaggcgggccggggggacagttcctcaggttatgctgacagaggctgtggagccacacacagccgatggctggacacccagccctgccccttagtgcctgtgacctgggacaggcaagtggcctactgtgagccccagcttccaccccaagggccctcctgtctgcctcccagggccatgggcagaggcttcagcttaaagatgtagggggaatcctgccacatggcgaaggatgctttgggtagagggaacaccacacgaggcctggccatgggacagagcaggctgttggagttggtgggaggggcccagagtggctgtgatgggggctggtgagcaggagctgggaaaggggctgtgtgtgctgagggggcatgtgttcacattgcctcagatcgagacagagctgggcaagaagaccctcagcaacctggagaagatccgggaggactaccgagccctccgccaggagaacgctggcctcctaggccgggtccgggaggcctgaggagccgccggcagaggtctctccccagcctcaggcagggatttggggtgctggaggcagtggccaagcacatgccctagctacttcctccgctgtccagttcctcctgctgcggccttggacccagacccctgcccactgaccgcaacccttatatggggtgatagtccagcatgtggggagctcggctgcagtttattggggacggtactgtgggttgggggccttggatcccaaataaatgagtagttcctctgcagtctaagctgaggcatggatcagggctcagggaatgggagtgaggtgagtggcaggggagacacggggtatttttggcaaggcagtgtgtgtggctgtgtgtgtctgcacgggactcaagagacccactggggggctgtgcgtgtgcatatgcgtgagatacacaggtgaattctaacaggccgtgtgtgtgagcgagcacgtgttgggacctcagatcctgagggtactgacgctgcttctgtgtaggcctctgggcacacccctgtgttgacagtgcccctgtgggccctgaggctggctgtgggtgcgtgccttggggtgtgtgggttgtcagggctgtgcttgtgtgtgattgtgtgatgatgcagctttgaggttgtttgagtgtactgaggcaggctctctgtgttttggggtttgtgttgagtgagggacaggattgtgacattttgtgtgtctgtgtgacttttccagccctgaagtaatctgtgcgagcagctgaggcaggctctgtgtggctggttgtgaaggctctgtttggctgcagggctcgactggggggtgtgtctggggcggaggtgggggctggggccaggaccggggcccctctgagcagccttggggcaaaggatatgatgggggagggggtggctgccagcgggggaacaggggccctggcaggcaagacagtggaaacctcacttcttggtccctgtgggcacatccagggcctatcatccctgcccccaccacctctgcctcccaccagtttggcccctgttcgtccatcctcctttccttgatcttgaggtcaggggccaggtgtagggttggaacacctgctgggcctctggctccgtttcttgcggaactccagctcatccacggtccacacagcccccttctcgctctccacccgcacaaagcacttgtgcagactcaggttgtggcggatggcgttctgtggaaggccggggacagggagcaggtgggcgtcaacctctgaggccagcagccaccaccaacaacccacatcccgttcctccccaatgtgcctatgagcccagacccaggcctgcccactttgagctgcgatggcacttgaggccatcccagtcaccgccacctcagaggagctcaccttccaggtggcaggatggtttctgaagaaggcaaacatgcgtgtgaaccagtggtagatctcattgagtgtccgctgcttctctggagcctccaggatggcctggaagttggggggtggggtaaggggcacattccccaaacttggggtttagaggggctatgacctaccccgagccatctgacatgggggcggaattgtaggggcaggtaatcagggacaggactagatgtggggtgaagcatggggtcaaagatggggttagaaaaggggtgaagtgtcgggttgggcagggttagatgggtgtgggtatggttgttctgggattaggtaagggatcaggactgaggttgggagtggggtcttgttcagggctagggctgaagtgaggtgaaaggtctgggatggagttggagttggggttctctgtggaggtgacatttcagggttggggaaggtgaagggtcagaagtggggtcaaggatttggaaggggtaaagggccaggccaacttaagggtcagggaaggggtgggttaagagtcaggctggggtggactcaggtggggggtctaggggtgagggatgggatgacttggctttaggtcagaagccagagatggtttgaattatcgagtatcttacgtgtcagggacatggttaggtggttaggctcagggcaaggatgaggttagttgtggggttcggtgtggagtgaggctgagggtcagggaatttgatcagtttggattcaggaatgggattacagagtcagcgatgatgattgcagtgaggctatcagtcaggatggggctaggtcagggtttcagttcagagacagtcggggaatatctggtatcatgtaggggtgaggttcaggtttggggttaggtgtggcgctaggatgaaggttctgagaaggcattggggaggctgagatgaaggagttgggatggggtgatgaagttaaggatcaaatgggtgttacaaggaaaggttgggaatggtgcccagttgggggtgtattgacatactggggtacgttggggccagggaaggagatggggttgggttggcataaaggctggggaaggagttagagtaagagctggggtacgtttagggcaaggtgcagagatggggttagctttaggctattttatgggtccaggagagggttaggtatggggctgaggtggacatctggaaaggggtaggtttagggtcagaatttggcatgctctggcctggatggtggtttaggtttggatttgcggacaggtttggggtgaagccagcatgaggggtcacatttgaggcacggcttggggatccttggggctggggcttgggaatggaggaacccactctgagggcactcagagggagacaggagtttgggaggcaggtcccccaccccatctttgtcttcctcctccttggggccgagct

SEQ ID NO: 1192 - DNA, 4046 bp, Homo sapiens
gctccatgggggctgtggcatgtgactgggtatccaccggccaggcagagtctgagtgccggcacagcaagctcagtacagcagagcgtgagcaggccctgcgcctgaagagccgcgcggtggagctgctgcccgatgggactgccaaccttgccaagctgcaggtggggttggggctgtagctgggcggagaggggcagggtggggtggggtggggttggagggcccagcctgtgtgacatgtacccatcccccaccagcttgtggtggagaatagtgcccagcgggtcatccacttggcgggtcagtgggagaagcaccgggtcccactcctcgctgagtaccgccacctccgaaagctgcaggattgcagagaggtaagcagtggggccctgggctgtgggcgggccagggcaggctcggtccctctctagggggccatccctatgctctgctcactgtcttctgcctgtgggctcatggcagctggaatcttctcgacggctggcagagatccaagaactgcaccagagtgtccgggcggctgctgaagaggcccgcaggaaggaggaggtctataagcagctggtaaggcctgtgtgagggacctgggtagcttaggagggtggggggatggtcctggggcagtgcctgctatatccctgcctagatgtcagagctggagactctgcccagagatgtgtcccggctggcctacacccagcgcatcctggagatcgtgggcaacatccggaagcagaaggaagagatcaccaaggtacactgccagggccatggagggtgggtcatgtgggctgtcaggcatagtgtggccgcacagggacctcacaccctcaggcagagctgtccagtcacactctaacacagaatagtcacacacaatccatcccagtcacccctgacacagtgacacagtccctgtctggtacacatgaggaccctccactgctagccagcctgccccaggcaggggctcatggctgccatggtgtctgccagatcttgtctgatacgaaggagcttcagaaggaaatcaactccctatctgggaagctggaccggacgtttgcggtgactgatgagcttgtgttcaaggtgtggggcaggttgggcgggggtgagtggggtgaggctgggctgctgccttgtgcatctgctaattggctggctggggtccagacccaggccctgtgcgaggctggaggtgcactgatacccagggctggctttgtttcatggaggatgaagctagtggggtggtgggagagggtggccttcttagggcatggagatggtcaagggcagcccactgatacctttgaggtccctgtgtctggtcaggatgccaagaaggacgatgctgttcggaaggcctataagtatctagctgctctgcacgaggtgaggggagacatgtgcctggggtggggctgctgggggtgggtgggactgggtgcaagccttctgctcctgttgtccccagaactgcagccagctcatccagaccatcgaggacacaggcaccatcatgcgggaggttcgagacctcgaggagcaggtgaggcctgggggcaggatggggagccaaggcgggccggggggacagttcctcaggttatgctgacagaggctgtggagccacacacagccgatggctggacacccagccctgccccttagtgcctgtgacctgggacaggcaagtggcctactgtgagccccagcttccaccccaagggccctcctgtctgcctcccagggccatgggcagaggcttcagcttaaagatgtagggggaatcctgccacatggcgaaggatgctttgggtagagggaacaccacacgaggcctggccatgggacagagcaggctgttggagttggtgggaggggcccagagtggctgtgatgggggctggtgagcaggagctgggaaaggggctgtgtgtgctgagggggcatgtgttcacattgcctcagatcgagacagagctgggcaagaagaccctcagcaacctggagaagatccgggaggactaccgagccctccgccaggagaacgctggcctcctaggccgggtccgggaggcctgaggagccgccggcagaggtctctccccagcctcaggcagggatttggggtgctggaggcagtggccaagcacatgccctagctacttcctccgctgtccagttcctcctgctgcggccttggacccagacccctgcccactgaccgcaacccttatatggggtgatagtccagcatgtggggagctcggctgcagtttattggggacggtactgtgggttgggggccttggatcccaaataaatgagtagttcctctgcagtctaagctgaggcatggatcagggctcagggaatgggagtgaggtgagtggcaggggagacacggggtatttttggcaaggcagtgtgtgtggctgtgtgtgtctgcacgggactcaagagacccactggggggctgtgcgtgtgcatatgcgtgagatacacaggtgaattctaacaggccgtgtgtgtgagcgagcacgtgttgggacctcagatcctgagggtactgacgctgcttctgtgtaggcctctgggcacacccctgtgttgacagtgcccctgtgggccctgaggctggctgtgggtgcgtgccttggggtgtgtgggttgtcagggctgtgcttgtgtgtgattgtgtgatgatgcagctttgaggttgtttgagtgtactgaggcaggctctctgtgttttggggtttgtgttgagtgagggacaggattgtgacattttgtgtgtctgtgtgacttttccagccctgaagtaatctgtgcgagcagctgaggcaggctctgtgtggctggttgtgaaggctctgtttggctgcagggctcgactggggggtgtgtctggggcggaggtgggggctggggccaggaccggggcccctctgagcagccttggggcaaaggatatgatgggggagggggtggctgccagcgggggaacaggggccctggcaggcaagacagtggaaacctcacttcttggtccctgtgggcacatccagggcctatcatccctgcccccaccacctctgcctcccaccagtttggcccctgttcgtccatcctcctttccttgatcttgaggtcaggggccaggtgtagggttggaacacctgctgggcctctggctccgtttcttgcggaactccagctcatccacggtccacacagcccccttctcgctctccacccgcacaaagcacttgtgcagactcaggttgtggcggatggcgttctgtggaaggccggggacagggagcaggtgggcgtcaacctctgaggccagcagccaccaccaacaacccacatcccgttcctccccaatgtgcctatgagcccagacccaggcctgcccactttgagctgcgatggcacttgaggccatcccagtcaccgccacctcagaggagctcaccttccaggtggcaggatggtttctgaagaaggcaaacatgcgtgtgaaccagtggtagatctcattgagtgtccgctgcttctctggagcctccaggatggcctggaagttggggggtggggtaaggggcacattccccaaacttggggtttagaggggctatgacctaccccgagccatctgacatgggggcggaattgtaggggcaggtaatcagggacaggactagatgtggggtgaagcatggggtcaaagatggggttagaaaaggggtgaagtgtcgggttgggcagggttagatgggtgtgggtatggttgttctgggattaggtaagggatcaggactgaggttgggagtggggtcttgttcagggctagggctgaagtgaggtgaaaggtctgggatggagttggagttggggttctctgtggaggtgacatttcagggttggggaaggtgaagggtcagaagtggggtcaaggatttggaaggggtaaagggccaggccaacttaagggtcagggaagg

SEQ ID NO: 1193 - DNA, 4047 bp, Homo sapiens
aacaggagctcgagtcccttcgggagcagctggaaggagtgaaccgcagcattgaggaggttgaggccgacatgaagaccctgggcgtcagctttgtgcaggtaaggggcggaggaggggctgcgcgttgggctaggtcagaaggagggcctcggggtgtgagggactagatggggcaagaggtgctctgtagaggtctgcacatggcagaagggttcctgggagccattagggatctgtgggcctcttgagggtggctatgagaatcaggccagggtgagggtctgtgggcatctatggggcaccgcgggtctgcatgggcaggggattgaggggtcctcggagggtctgtgggcatctgtggggtacccacgggtctgcatggacaggggattagggggtcctcggggtccttggcaccagcgtggagctgttagagaggcctgtgggggccacaggggtgtacagtcatctgtggagctccatgggggctgtggcatgtgactgggtatccaccggccaggcagagtctgagtgccggcacagcaagctcagtacagcagagcgtgagcaggccctgcgcctgaagagccgcgcggtggagctgctgcccgatgggactgccaaccttgccaagctgcaggtggggttggggctgtagctgggcggagaggggcagggtggggtggggtggggttggagggcccagcctgtgtgacatgtacccatcccccaccagcttgtggtggagaatagtgcccagcgggtcatccacttggcgggtcagtgggagaagcaccgggtcccactcctcgctgagtaccgccacctccgaaagctgcaggattgcagagaggtaagcagtggggccctgggctgtgggcgggccagggcaggctcggtccctctctagggggccatccctatgctctgctcactgtcttctgcctgtgggctcatggcagctggaatcttctcgacggctggcagagatccaagaactgcaccagagtgtccgggcggctgctgaagaggcccgcaggaaggaggaggtctataagcagctggtaaggcctgtgtgagggacctgggtagcttaggagggtggggggatggtcctggggcagtgcctgctatatccctgcctagatgtcagagctggagactctgcccagagatgtgtcccggctggcctacacccagcgcatcctggagatcgtgggcaacatccggaagcagaaggaagagatcaccaaggtacactgccagggccatggagggtgggtcatgtgggctgtcaggcatagtgtggccgcacagggacctcacaccctcaggcagagctgtccagtcacactctaacacagaatagtcacacacaatccatcccagtcacccctgacacagtgacacagtccctgtctggtacacatgaggaccctccactgctagccagcctgccccaggcaggggctcatggctgccatggtgtctgccagatcttgtctgatacgaaggagcttcagaaggaaatcaactccctatctgggaagctggaccggacgtttgcggtgactgatgagcttgtgttcaaggtgtggggcaggttgggcgggggtgagtggggtgaggctgggctgctgccttgtgcatctgctaattggctggctggggtccagacccaggccctgtgcgaggctggaggtgcactgatacccagggctggctttgtttcatggaggatgaagctagtggggtggtgggagagggtggccttcttagggcatggagatggtcaagggcagcccactgatacctttgaggtccctgtgtctggtcaggatgccaagaaggacgatgctgttcggaaggcctataagtatctagctgctctgcacgaggtgaggggagacatgtgcctggggtggggctgctgggggtgggtgggactgggtgcaagccttctgctcctgttgtccccagaactgcagccagctcatccagaccatcgaggacacaggcaccatcatgcgggaggttcgagacctcgaggagcaggtgaggcctgggggcaggatggggagccaaggcgggccggggggacagttcctcaggttatgctgacagaggctgtggagccacacacagccgatggctggacacccagccctgccccttagtgcctgtgacctgggacaggcaagtggcctactgtgagccccagcttccaccccaagggccctcctgtctgcctcccagggccatgggcagaggcttcagcttaaagatgtagggggaatcctgccacatggcgaaggatgctttgggtagagggaacaccacacgaggcctggccatgggacagagcaggctgttggagttggtgggaggggcccagagtggctgtgatgggggctggtgagcaggagctgggaaaggggctgtgtgtgctgagggggcatgtgttcacattgcctcagatcgagacagagctgggcaagaagaccctcagcaacctggagaagatccgggaggactaccgagccctccgccaggagaacgctggcctcctaggccgggtccgggaggcctgaggagccgccggcagaggtctctccccagcctcaggcagggatttggggtgctggaggcagtggccaagcacatgccctagctacttcctccgctgtccagttcctcctgctgcggccttggacccagacccctgcccactgaccgcaacccttatatggggtgatagtccagcatgtggggagctcggctgcagtttattggggacggtactgtgggttgggggccttggatcccaaataaatgagtagttcctctgcagtctaagctgaggcatggatcagggctcagggaatgggagtgaggtgagtggcaggggagacacggggtatttttggcaaggcagtgtgtgtggctgtgtgtgtctgcacgggactcaagagacccactggggggctgtgcgtgtgcatatgcgtgagatacacaggtgaattctaacaggccgtgtgtgtgagcgagcacgtgttgggacctcagatcctgagggtactgacgctgcttctgtgtaggcctctgggcacacccctgtgttgacagtgcccctgtgggccctgaggctggctgtgggtgcgtgccttggggtgtgtgggttgtcagggctgtgcttgtgtgtgattgtgtgatgatgcagctttgaggttgtttgagtgtactgaggcaggctctctgtgttttggggtttgtgttgagtgagggacaggattgtgacattttgtgtgtctgtgtgacttttccagccctgaagtaatctgtgcgagcagctgaggcaggctctgtgtggctggttgtgaaggctctgtttggctgcagggctcgactggggggtgtgtctggggcggaggtgggggctggggccaggaccggggcccctctgagcagccttggggcaaaggatatgatgggggagggggtggctgccagcgggggaacaggggccctggcaggcaagacagtggaaacctcacttcttggtccctgtgggcacatccagggcctatcatccctgcccccaccacctctgcctcccaccagtttggcccctgttcgtccatcctcctttccttgatcttgaggtcaggggccaggtgtagggttggaacacctgctgggcctctggctccgtttcttgcggaactccagctcatccacggtccacacagcccccttctcgctctccacccgcacaaagcacttgtgcagactcaggttgtggcggatggcgttctgtggaaggccggggacagggagcaggtgggcgtcaacctctgaggccagcagccaccaccaacaacccacatcccgttcctccccaatgtgcctatgagcccagacccaggcctgcccactttgagctgcgatggcacttgaggccatcccagtcaccgccacctcagaggagctcaccttccaggtggcaggatggtttctgaagaaggcaaacatgcgtgtgaacca

SEQ ID NO: 1194 - DNA, 4047 bp, Homo sapiens
ggtgcttcagtgggcatgcatgccgcactgggggcagttctcaggggaggctgaggctgggccacgtgaggaagggccttccctggcagccaggatgcccctcgtcactccccttaggagccccaggcccaggccactcaggtgtcagatgtgccagccacctcccggcggcctgaacaggtgagcagagtggtttggaggggggtgtcccaggcccttgcttgtctactgggcctgacaccccaaccctgactggcctgggcctcccaggtcacgtgggcagctcaggaacaggagctcgagtcccttcgggagcagctggaaggagtgaaccgcagcattgaggaggttgaggccgacatgaagaccctgggcgtcagctttgtgcaggtaaggggcggaggaggggctgcgcgttgggctaggtcagaaggagggcctcggggtgtgagggactagatggggcaagaggtgctctgtagaggtctgcacatggcagaagggttcctgggagccattagggatctgtgggcctcttgagggtggctatgagaatcaggccagggtgagggtctgtgggcatctatggggcaccgcgggtctgcatgggcaggggattgaggggtcctcggagggtctgtgggcatctgtggggtacccacgggtctgcatggacaggggattagggggtcctcggggtccttggcaccagcgtggagctgttagagaggcctgtgggggccacaggggtgtacagtcatctgtggagctccatgggggctgtggcatgtgactgggtatccaccggccaggcagagtctgagtgccggcacagcaagctcagtacagcagagcgtgagcaggccctgcgcctgaagagccgcgcggtggagctgctgcccgatgggactgccaaccttgccaagctgcaggtggggttggggctgtagctgggcggagaggggcagggtggggtggggtggggttggagggcccagcctgtgtgacatgtacccatcccccaccagcttgtggtggagaatagtgcccagcgggtcatccacttggcgggtcagtgggagaagcaccgggtcccactcctcgctgagtaccgccacctccgaaagctgcaggattgcagagaggtaagcagtggggccctgggctgtgggcgggccagggcaggctcggtccctctctagggggccatccctatgctctgctcactgtcttctgcctgtgggctcatggcagctggaatcttctcgacggctggcagagatccaagaactgcaccagagtgtccgggcggctgctgaagaggcccgcaggaaggaggaggtctataagcagctggtaaggcctgtgtgagggacctgggtagcttaggagggtggggggatggtcctggggcagtgcctgctatatccctgcctagatgtcagagctggagactctgcccagagatgtgtcccggctggcctacacccagcgcatcctggagatcgtgggcaacatccggaagcagaaggaagagatcaccaaggtacactgccagggccatggagggtgggtcatgtgggctgtcaggcatagtgtggccgcacagggacctcacaccctcaggcagagctgtccagtcacactctaacacagaatagtcacacacaatccatcccagtcacccctgacacagtgacacagtccctgtctggtacacatgaggaccctccactgctagccagcctgccccaggcaggggctcatggctgccatggtgtctgccagatcttgtctgatacgaaggagcttcagaaggaaatcaactccctatctgggaagctggaccggacgtttgcggtgactgatgagcttgtgttcaaggtgtggggcaggttgggcgggggtgagtggggtgaggctgggctgctgccttgtgcatctgctaattggctggctggggtccagacccaggccctgtgcgaggctggaggtgcactgatacccagggctggctttgtttcatggaggatgaagctagtggggtggtgggagagggtggccttcttagggcatggagatggtcaagggcagcccactgatacctttgaggtccctgtgtctggtcaggatgccaagaaggacgatgctgttcggaaggcctataagtatctagctgctctgcacgaggtgaggggagacatgtgcctggggtggggctgctgggggtgggtgggactgggtgcaagccttctgctcctgttgtccccagaactgcagccagctcatccagaccatcgaggacacaggcaccatcatgcgggaggttcgagacctcgaggagcaggtgaggcctgggggcaggatggggagccaaggcgggccggggggacagttcctcaggttatgctgacagaggctgtggagccacacacagccgatggctggacacccagccctgccccttagtgcctgtgacctgggacaggcaagtggcctactgtgagccccagcttccaccccaagggccctcctgtctgcctcccagggccatgggcagaggcttcagcttaaagatgtagggggaatcctgccacatggcgaaggatgctttgggtagagggaacaccacacgaggcctggccatgggacagagcaggctgttggagttggtgggaggggcccagagtggctgtgatgggggctggtgagcaggagctgggaaaggggctgtgtgtgctgagggggcatgtgttcacattgcctcagatcgagacagagctgggcaagaagaccctcagcaacctggagaagatccgggaggactaccgagccctccgccaggagaacgctggcctcctaggccgggtccgggaggcctgaggagccgccggcagaggtctctccccagcctcaggcagggatttggggtgctggaggcagtggccaagcacatgccctagctacttcctccgctgtccagttcctcctgctgcggccttggacccagacccctgcccactgaccgcaacccttatatggggtgatagtccagcatgtggggagctcggctgcagtttattggggacggtactgtgggttgggggccttggatcccaaataaatgagtagttcctctgcagtctaagctgaggcatggatcagggctcagggaatgggagtgaggtgagtggcaggggagacacggggtatttttggcaaggcagtgtgtgtggctgtgtgtgtctgcacgggactcaagagacccactggggggctgtgcgtgtgcatatgcgtgagatacacaggtgaattctaacaggccgtgtgtgtgagcgagcacgtgttgggacctcagatcctgagggtactgacgctgcttctgtgtaggcctctgggcacacccctgtgttgacagtgcccctgtgggccctgaggctggctgtgggtgcgtgccttggggtgtgtgggttgtcagggctgtgcttgtgtgtgattgtgtgatgatgcagctttgaggttgtttgagtgtactgaggcaggctctctgtgttttggggtttgtgttgagtgagggacaggattgtgacattttgtgtgtctgtgtgacttttccagccctgaagtaatctgtgcgagcagctgaggcaggctctgtgtggctggttgtgaaggctctgtttggctgcagggctcgactggggggtgtgtctggggcggaggtgggggctggggccaggaccggggcccctctgagcagccttggggcaaaggatatgatgggggagggggtggctgccagcgggggaacaggggccctggcaggcaagacagtggaaacctcacttcttggtccctgtgggcacatccagggcctatcatccctgcccccaccacctctgcctcccaccagtttggcccctgttcgtccatcctcctttccttgatcttgaggtcaggggccaggtgtagggttggaacacctgctgggcctctggctccgtttcttgcggaactccagctcatccacggtccacacagccccct

SEQ ID NO: 1195 - DNA, 4032 bp, Homo sapiens
atgttcactctgagggccccccatccttctcatgggcatttgaggcttgagagatggggcaggtgggtaggagctgtgacagggtcagggagatttctccacgagcaagcactctggcccgaggttgcagatggtgcctttacccacatagtcacagtctggccaccatcggtgcttcagtgggcatgcatgccgcactgggggcagttctcaggggaggctgaggctgggccacgtgaggaagggccttccctggcagccaggatgcccctcgtcactccccttaggagccccaggcccaggccactcaggtgtcagatgtgccagccacctcccggcggcctgaacaggtgagcagagtggtttggaggggggtgtcccaggcccttgcttgtctactgggcctgacaccccaaccctgactggcctgggcctcccaggtcacgtgggcagctcaggaacaggagctcgagtcccttcgggagcagctggaaggagtgaaccgcagcattgaggaggttgaggccgacatgaagaccctgggcgtcagctttgtgcaggtaaggggcggaggaggggctgcgcgttgggctaggtcagaaggagggcctcggggtgtgagggactagatggggcaagaggtgctctgtagaggtctgcacatggcagaagggttcctgggagccattagggatctgtgggcctcttgagggtggctatgagaatcaggccagggtgagggtctgtgggcatctatggggcaccgcgggtctgcatgggcaggggattgaggggtcctcggagggtctgtgggcatctgtggggtacccacgggtctgcatggacaggggattagggggtcctcggggtccttggcaccagcgtggagctgttagagaggcctgtgggggccacaggggtgtacagtcatctgtggagctccatgggggctgtggcatgtgactgggtatccaccggccaggcagagtctgagtgccggcacagcaagctcagtacagcagagcgtgagcaggccctgcgcctgaagagccgcgcggtggagctgctgcccgatgggactgccaaccttgccaagctgcaggtggggttggggctgtagctgggcggagaggggcagggtggggtggggtggggttggagggcccagcctgtgtgacatgtacccatcccccaccagcttgtggtggagaatagtgcccagcgggtcatccacttggcgggtcagtgggagaagcaccgggtcccactcctcgctgagtaccgccacctccgaaagctgcaggattgcagagaggtaagcagtggggccctgggctgtgggcgggccagggcaggctcggtccctctctagggggccatccctatgctctgctcactgtcttctgcctgtgggctcatggcagctggaatcttctcgacggctggcagagatccaagaactgcaccagagtgtccgggcggctgctgaagaggcccgcaggaaggaggaggtctataagcagctggtaaggcctgtgtgagggacctgggtagcttaggagggtggggggatggtcctggggcagtgcctgctatatccctgcctagatgtcagagctggagactctgcccagagatgtgtcccggctggcctacacccagcgcatcctggagatcgtgggcaacatccggaagcagaaggaagagatcaccaaggtacactgccagggccatggagggtgggtcatgtgggctgtcaggcatagtgtggccgcacagggacctcacaccctcaggcagagctgtccagtcacactctaacacagaatagtcacacacaatccatcccagtcacccctgacacagtgacacagtccctgtctggtacacatgaggaccctccactgctagccagcctgccccaggcaggggctcatggctgccatggtgtctgccagatcttgtctgatacgaaggagcttcagaaggaaatcaactccctatctgggaagctggaccggacgtttgcggtgactgatgagcttgtgttcaaggtgtggggcaggttgggcgggggtgagtggggtgaggctgggctgctgccttgtgcatctgctaattggctggctggggtccagacccaggccctgtgcgaggctggaggtgcactgatacccagggctggctttgtttcatggaggatgaagctagtggggtggtgggagagggtggccttcttagggcatggagatggtcaagggcagcccactgatacctttgaggtccctgtgtctggtcaggatgccaagaaggacgatgctgttcggaaggcctataagtatctagctgctctgcacgaggtgaggggagacatgtgcctggggtggggctgctgggggtgggtgggactgggtgcaagccttctgctcctgttgtccccagaactgcagccagctcatccagaccatcgaggacacaggcaccatcatgcgggaggttcgagacctcgaggagcaggtgaggcctgggggcaggatggggagccaaggcgggccggggggacagttcctcaggttatgctgacagaggctgtggagccacacacagccgatggctggacacccagccctgccccttagtgcctgtgacctgggacaggcaagtggcctactgtgagccccagcttccaccccaagggccctcctgtctgcctcccagggccatgggcagaggcttcagcttaaagatgtagggggaatcctgccacatggcgaaggatgctttgggtagagggaacaccacacgaggcctggccatgggacagagcaggctgttggagttggtgggaggggcccagagtggctgtgatgggggctggtgagcaggagctgggaaaggggctgtgtgtgctgagggggcatgtgttcacattgcctcagatcgagacagagctgggcaagaagaccctcagcaacctggagaagatccgggaggactaccgagccctccgccaggagaacgctggcctcctaggccgggtccgggaggcctgaggagccgccggcagaggtctctccccagcctcaggcagggatttggggtgctggaggcagtggccaagcacatgccctagctacttcctccgctgtccagttcctcctgctgcggccttggacccagacccctgcccactgaccgcaacccttatatggggtgatagtccagcatgtggggagctcggctgcagtttattggggacggtactgtgggttgggggccttggatcccaaataaatgagtagttcctctgcagtctaagctgaggcatggatcagggctcagggaatgggagtgaggtgagtggcaggggagacacggggtatttttggcaaggcagtgtgtgtggctgtgtgtgtctgcacgggactcaagagacccactggggggctgtgcgtgtgcatatgcgtgagatacacaggtgaattctaacaggccgtgtgtgtgagcgagcacgtgttgggacctcagatcctgagggtactgacgctgcttctgtgtaggcctctgggcacacccctgtgttgacagtgcccctgtgggccctgaggctggctgtgggtgcgtgccttggggtgtgtgggttgtcagggctgtgcttgtgtgtgattgtgtgatgatgcagctttgaggttgtttgagtgtactgaggcaggctctctgtgttttggggtttgtgttgagtgagggacaggattgtgacattttgtgtgtctgtgtgacttttccagccctgaagtaatctgtgcgagcagctgaggcaggctctgtgtggctggttgtgaaggctctgtttggctgcagggctcgactggggggtgtgtctggggcggaggtgggggctggggccaggaccggggcccctctgagcagccttggggcaaaggatatgatgggggagggggtggctgccagcgggggaacaggggccctggcaggcaagacagtggaaacctcacttcttggtccctgtgg

SEQ ID NO: 1196 - DNA, 4044 bp, Homo sapiens
tctgcgccaaagctggggcctgcttggggcccccatacaagcccgggacctgggagaactgctgcaggcctggggtgctggggccaagactggtgctcctaagggctcccgcttcacgcactcagagaagttcaccttccatctggtgggtgcgcctgaggacatgagatgtgtggatgggcgtggcaggcttggagggtggctttttgtgtcagcaccacacctttatccacacaggttcctgtgttcccactggacaggccctcgccccactgtgggatgggtacccagaggggtcccctagcttattagggacttgactggagaaaatgtggataggtgggaaccatgcaaaggtgtgggggtgttcttggggcaacaccccctttcctcaggcagtttcctttgagcatatcttctgtcctaagatgttcactctgagggccccccatccttctcatgggcatttgaggcttgagagatggggcaggtgggtaggagctgtgacagggtcagggagatttctccacgagcaagcactctggcccgaggttgcagatggtgcctttacccacatagtcacagtctggccaccatcggtgcttcagtgggcatgcatgccgcactgggggcagttctcaggggaggctgaggctgggccacgtgaggaagggccttccctggcagccaggatgcccctcgtcactccccttaggagccccaggcccaggccactcaggtgtcagatgtgccagccacctcccggcggcctgaacaggtgagcagagtggtttggaggggggtgtcccaggcccttgcttgtctactgggcctgacaccccaaccctgactggcctgggcctcccaggtcacgtgggcagctcaggaacaggagctcgagtcccttcgggagcagctggaaggagtgaaccgcagcattgaggaggttgaggccgacatgaagaccctgggcgtcagctttgtgcaggtaaggggcggaggaggggctgcgcgttgggctaggtcagaaggagggcctcggggtgtgagggactagatggggcaagaggtgctctgtagaggtctgcacatggcagaagggttcctgggagccattagggatctgtgggcctcttgagggtggctatgagaatcaggccagggtgagggtctgtgggcatctatggggcaccgcgggtctgcatgggcaggggattgaggggtcctcggagggtctgtgggcatctgtggggtacccacgggtctgcatggacaggggattagggggtcctcggggtccttggcaccagcgtggagctgttagagaggcctgtgggggccacaggggtgtacagtcatctgtggagctccatgggggctgtggcatgtgactgggtatccaccggccaggcagagtctgagtgccggcacagcaagctcagtacagcagagcgtgagcaggccctgcgcctgaagagccgcgcggtggagctgctgcccgatgggactgccaaccttgccaagctgcaggtggggttggggctgtagctgggcggagaggggcagggtggggtggggtggggttggagggcccagcctgtgtgacatgtacccatcccccaccagcttgtggtggagaatagtgcccagcgggtcatccacttggcgggtcagtgggagaagcaccgggtcccactcctcgctgagtaccgccacctccgaaagctgcaggattgcagagaggtaagcagtggggccctgggctgtgggcgggccagggcaggctcggtccctctctagggggccatccctatgctctgctcactgtcttctgcctgtgggctcatggcagctggaatcttctcgacggctggcagagatccaagaactgcaccagagtgtccgggcggctgctgaagaggcccgcaggaaggaggaggtctataagcagctggtaaggcctgtgtgagggacctgggtagcttaggagggtggggggatggtcctggggcagtgcctgctatatccctgcctagatgtcagagctggagactctgcccagagatgtgtcccggctggcctacacccagcgcatcctggagatcgtgggcaacatccggaagcagaaggaagagatcaccaaggtacactgccagggccatggagggtgggtcatgtgggctgtcaggcatagtgtggccgcacagggacctcacaccctcaggcagagctgtccagtcacactctaacacagaatagtcacacacaatccatcccagtcacccctgacacagtgacacagtccctgtctggtacacatgaggaccctccactgctagccagcctgccccaggcaggggctcatggctgccatggtgtctgccagatcttgtctgatacgaaggagcttcagaaggaaatcaactccctatctgggaagctggaccggacgtttgcggtgactgatgagcttgtgttcaaggtgtggggcaggttgggcgggggtgagtggggtgaggctgggctgctgccttgtgcatctgctaattggctggctggggtccagacccaggccctgtgcgaggctggaggtgcactgatacccagggctggctttgtttcatggaggatgaagctagtggggtggtgggagagggtggccttcttagggcatggagatggtcaagggcagcccactgatacctttgaggtccctgtgtctggtcaggatgccaagaaggacgatgctgttcggaaggcctataagtatctagctgctctgcacgaggtgaggggagacatgtgcctggggtggggctgctgggggtgggtgggactgggtgcaagccttctgctcctgttgtccccagaactgcagccagctcatccagaccatcgaggacacaggcaccatcatgcgggaggttcgagacctcgaggagcaggtgaggcctgggggcaggatggggagccaaggcgggccggggggacagttcctcaggttatgctgacagaggctgtggagccacacacagccgatggctggacacccagccctgccccttagtgcctgtgacctgggacaggcaagtggcctactgtgagccccagcttccaccccaagggccctcctgtctgcctcccagggccatgggcagaggcttcagcttaaagatgtagggggaatcctgccacatggcgaaggatgctttgggtagagggaacaccacacgaggcctggccatgggacagagcaggctgttggagttggtgggaggggcccagagtggctgtgatgggggctggtgagcaggagctgggaaaggggctgtgtgtgctgagggggcatgtgttcacattgcctcagatcgagacagagctgggcaagaagaccctcagcaacctggagaagatccgggaggactaccgagccctccgccaggagaacgctggcctcctaggccgggtccgggaggcctgaggagccgccggcagaggtctctccccagcctcaggcagggatttggggtgctggaggcagtggccaagcacatgccctagctacttcctccgctgtccagttcctcctgctgcggccttggacccagacccctgcccactgaccgcaacccttatatggggtgatagtccagcatgtggggagctcggctgcagtttattggggacggtactgtgggttgggggccttggatcccaaataaatgagtagttcctctgcagtctaagctgaggcatggatcagggctcagggaatgggagtgaggtgagtggcaggggagacacggggtatttttggcaaggcagtgtgtgtggctgtgtgtgtctgcacgggactcaagagacccactggggggctgtgcgtgtgcatatgcgtgagatacacaggtgaattctaacaggccgtgtgtgtgagcgagcacgtgttgggacctcagatcctgagggtactgacgctgcttctgtgtaggcctctgggcacacccctgtgttgacagtgcccctgtgggccctgaggctggctgt

SEQ ID NO: 1197 - DNA, 54306 bp, Homo sapiens
tcctctgggccccttctcagccacatccctccctctgccagaggtgaacactatcctgactctggtaatcagcccctcgcttttctttacaatgtcaccatttaggtggtaattcatgagttttgcctgcttgtgaactttgcataaatggatcagtgtggaagcttttttttggctttttgtgattcatctgtatgctttcgtgcagttatggatcttccattctcattatacaatattccattctgcgaatataccacaatttatttagatgcttattggcatctaaggtttgagcccttcatcagttatatgtgattccattatctcctcccaatttttcacttgtgttttcactcctttttgttttgcttttattcatagcaacctactacataaggttttcactctctttatggtgtcttttgatcaatggacattcctaattttaaggtcactgaatgtttcgtaattttcatttatggttgtttctgtgtcgtgatgaagaaaaactttgctaccatgagtatacgaaggtgttttgccttgttttttgttttgttttgtttttgagatggagtctcgatctgtggcccaggctggagtgcagtggtgccatctcggctcactgcaacctctgccccctgagttcaaacgattgtcccgcctcagcctcccaaacagctgggactacaggtggatgcccagctaatttttgtatttttagtagagacggggtttcaccatgttggccaggctggtggtctcaaactcctgatccgcccatctagacctcccaaagtgctgggattacaagagtgagccacagcacccggccctgcctcattgtattcttaaagcgctttggttttgcccttcgcatttaggctttaaacccacttagaattatttttatttgtgttgtaaagtagggatccaagttcatatttttcaatgcgggtaaccaattgttctatttattcaaaatccaatcatttccccactggtctaacacacttccttggtcaccagttctgtgtctacacgagtgtgtctacactgtttccgagatcactgtttttttattggtcgatttgtctactcttgcaaaaatatcgtgccatctgaatataccattacaataagtatcagtgtcctggctagtcttggcacttctacataaatttaagaattaatgtgtcatgatctacacacaggcaaaactctattggaattgtggttggatttgcattgaacctacaaagcagtttcaagagaactgacagctttgcacagtggccagtgaggaagaagggaaatgaggagagtgtggtatcttggaaaccaagtgaagaaagggttgcaaggtagagatgatcaactatgtcaaatgctgccaatatcccaagtaagatgacatctgagacttaaccatggctataacaatgtgaatatcttcagcagttttgctgaaatggttgggcaaaaaagatctgattggggctatttcagaaaggcatcatagaagaactgaagaaagctcgtatagatatttcttccaataggttttgctgtaaagggaagtaaataaatatgtggtgttttattttgttgagcagttttttatttgcatgcaataaatatatatctttctttcaaagcttctgggcttcctgtttttagtagaaatgtgatgtctgtggacagcaactgtgctaccaagtactgcagtacattaactcctctttcctttctgaggccttccttatctcagggactaaggggtctccctgctggtgtcaaaggctgttttttcagtaacctcaaaaccttgtggctgattcacaactgatgtccccacatccacaggagaccacagctaccactgcaaccatgtgactgacaccaaaccctcatgtggctgccactcttcctccctggctcccaccaccaccatccaaatacacacctgtagggtcccacaggcagaatgtggaaaagacaaagaaccatatggattaggaccacgagacgaggagacacacatcttcaaggaaagacatgttgaagcagcagcaggcgaccacgtcccacccccaactccccactgtgatcctcccacagaaagtgaccaccctgcacactcatgcccaaacaggagaacactacaccgcaagacactgtttctcatagagctctattgtggcatataataataggtactctatataaattaaattaaaaataaagctccagcaggttgcacaggttggctgttaataaatatatctctgggtaattgtgccccaagaccagctcacgaccactctccctcatccagagaattatacaaaaataaatacaggctcggggggtaggcggaggacatgcccagttccactctaaaagttcccctcactcacaccatctacccgttccctcatctccactggtgtcaccacagggagccctgtgttgactggagagcttggggatgagaaggcctctctttcagttgagcattctcagaagcaaaggacccaggtcccctcactgcacaggccatgtatcccatcttaagcctctgctgatcccacaagcagagcctatgagaaccaagccagagagaggcacagcgcaagcaccaggagggacacaccgctgttcagagccacagggaccaccactagcccggccaggacccccagagtctgggtcaagggcccccggagctgaggaggcagtgcacacacacattctgcagggactgctagggtgggagacttctttgggggttcaaggcttgggcctgcatccttttcatcctgggagctcacatgaggcctggctacactagagagacagacttcggcccccaagggactgaggagggtgggattttgcccctgcagaaggacgggagaggctggctccttgccagatatgggatccaagctgcctgcccactcactggtgacctctatctgggcttctgtcccggcctcccccagggactcagtcaccccagctatcaccctattcatgtgcaaagagctggtgtccttgcccatccctttctcaggatccccaatgaactgaccctctgtacccagaaccacagggccgtcacatcctgagccctctgcccatgggagccacacatctcccatcgtggctaccacagaacgggccccggagaggatttctggaggcgattccttggggctgtccccttctgggctggagggtgtgacagagagcccctcttcaccctccccttcatcatcagggtcttcggtgtccttgatgagctccacgccacgccccagccgggcatagtgcagcgtgatctcctcagccagggcgctgttcagggcccgctcagggccaggccacttcaagatcaggtcgcggtccgtcagtatgcccaggggatggctgggggacatccctccatctgtggagccctccccaccaccccctgccccacccgcagccacagcagcccgtaggcggctcaggtgagacaggtagagctgctccagctcctggtcgatggtgtcctcaccgagcagctcctctgacccactcacagcctccagcccccctccattctcactcgatactccccatgtggcctctgcctgctgctgactgggctccaggaaaggcccggtggccccctcgctcgcatcgggccctgaggcctggtctctgggggagccacccaggccacagagaggggaggaggggggaatcctgatggccggtgcctggaggacctctgtaaaagccacaggtggactgcttctggggacatcaccttcttctgcggggttgccagtcatcggaacgtcagaaacctggagccatggccggggcaagggggcagagaaaaagcaagggaatgaagcagaggaggggatggaacaagcagagacagtaagaagtgtgacagcccacagccagccccacaggggtttctatataaaaatgccttaaagcgccctctgtcactgtctagactccaaagactgtcatctatggtaaaataacacaattggatgcagtaaaacagggcttcttgcagattataaagctgaggaattcggtgggtgtgaatatttggtgaatgatcatcactaaatactgctggcttaccttcaaaacagagccagttaaaataactaaaagtgtaagtagccaggcacagtggctctcacctgtaatccaagcactttaggaagccaaggcgggcggatcacatgaaactaggagttcgagaccagcctggccaacatggtgaaaccccgtctctaccaaaaatacaaaaattagctgggcgtggtgttgtgcgcctgtaatctcaagaggctgaggcaggagaatcacttgaacccagagggcagagattgcagtgagccgagactgtgccactgcactgcagcctgggcgacagagactttgtctcaaaaaaaaaaaaaataaagagtgtaagtggattgtttgtaacacacaggataaatgcttgaggagatgcatacctcattctccatgatgtgattattacacaatgcatgcctatatcaaaacatctccataaatatatacacttactatgtcccctcaaaaattaaaaattaaaaaaattttaaaaaaaataaaatgcaaaaaaatcccaaaacatagccaggatgtccatatgaacccatgatgtatcatcttctctttaaaaaacaattatttcctagctccatcttttgaaagggcctagaaacaatgaccaatctagtagcagcaagcatgccgagcccccaaatcttggcctttgaatgccactctccactgaaaggaatcagtgctccttaaagaaatagctgtttctggccaggctcagtggctcacgcctgtaatcccagcactttgggaggccaaggcaggtggatcaccaggcaggtcaggagttcaagaccagcctggccaacatggtgaaaccccatctctgcaaaaatacaaaaatcagccgggtgtggtggcatgtgcctgtaatcccagctactcaagaggctgagacaggagaattgcttgaacccagaaggcagaggttgcagtgaaccgagattgtgccactgcactccagcctgggcgacagagaaagactctgactcaaaaaaaaaaaaaaaaaaaagaaagaaaaagaaaaaagaaagaaagagagagagagaggaaagaaaggaaagaaaaataaagtaaaagaaaagaaagaaagagagagacaaaggaaaggaaagaaagaaaggaaaggtaaggaaagaaaggaaaggaaagaaaagaaagaaaaagaaaaagaaaataaagaaaagaaaagcaagaaagaaatggctgtttccaggcttggggcagggagagtacaggatgaacctagcacatattgtcatggaagatgtgagaaaggctcacagaatgatgagggcgtgtcaaaaggacagagtagcccatctcaataagctcctactagccagggatagttcaatttaagcatcaaaaaaagcaaacaaataagtgcaatggattgaaactcattcaaatatgtttagaattcatgagttcataatgacacaaaaccaaaaatccttttattggtcacctttgtagtagtacttctctgaaaactggtaaataaaatggaaaaaattaaatatttacactgctttttctgcacaaactatatctcaaagtagccaaatagctggtgtgggacagtttttctttagagaagaattctagctaataaaggaagtgggaataatagaattaaatagagttaattctagttaatttaataataaaagattaaatacattcgtttaatacaatttgataaattaaataaatttaataagattacattaattaatataattaataaattaataaaaatggagtaagaaatgtatttccacctggatgtaatcagccagacccagactggaaaattctacaggacaagcaaagtttcttcaaccaacaaattgcaaagaaacaaagtgggggagattttaaaaatctaaagagacacatcaatcaaatgcaacatgtcaactttgtttggatcctaaacacttatgagagaagaaaacttgaacactgaccaaatacttgatgatactgaggaattaccgtttattttctaaggtgtgatgatagtattgtggggttaagaattcttaattttctggccagacgtgatggctcacacctgtaatcccagcactttgggaggccaaggcaacggatcccgtctctactaaaaatacaaaaattagctggatgtacttgcttgaacccaggaggcagaggttgcagtaagctgagatcacaccactgcactccagcctaggtgacagagtgagactctgtctcaaaaaaaaaaacaaaaaagagttcttaattttctgagatacaaacagaagtatttatggatgggatgatgtctggatgtcttccaaaataattccagagggaatgggagggaggagacggggtacagataaaataagaatgagcacgtgttgatatttactgaagctgggggatggtgtacgtaggttcattatactattttacttttgtatgtttgaaactttttgtaattaaaaagttcacacacacacacacacacacacacacaccctccaaaatgtctctacctcccctacctaccatcactctcgcctggaccactgcagtggcctccccttcacgagtcgcctgtttccacccttactctgacgtctattttccaagcagcagccagagggagcctgttaaatcctaaatcagattacatccctcctccgtccacaatgctcttgcggctccccctcactcggagtaaaagccaaagtcttcaccatggcctgtgaggcaccacccaatctgtcctcagccacctctctccctcaccccgcaccactctccccctccctcgttctgcccctgctgcgctggcttctacactgtccctcacacacgttagtcatggcctcacctcaggaacttcacactcgcctgggatgttcttcccttagttatccacgtggctcactctctcaccttcctcagatcttcgctcagatctcactaatcactaaagccttcccaggccacccaatctaaagttgcaaccgacccccgcccacaacacacacacacacacacacacacacacacacacacacacacacacacagagtctctcacccactccctattcctttctatttttccttatcactcatcatcacctaaagtaccatatattctattactttatcatgtctcaccctactaacacataagccccctcaaagagcgtttttgcatgtttgtaacagtgcttagcacagaacaagcactccataaatttttgctaaattaacaaatgacatttctacaagcccagctgagtaactgcattctccccctcccccatcaggttctgagttttgtgccctccctccaacccagggaggacccagagctagtgggccccaccacccagcccagcaatagtcacactgtgagcctcctattgggctgtctactccaaggctgcaaggacccacttacctgaagtgtcatctggggccatggacggagaggggtgggggctaccagtggacccactgactcctggacatcaggatgctctgctagagggaagagaaaggcagcattgggcaagacaggcatacaagtaggtatggttttgttaagaaaatctgccatcctagccaactggcagttttgcctctgaagctttctgtgacaatctaaagcagagggtaccccttcattttttttttgagatagggtctcgatgtgtcaccaaggctggggtgcagtggcacaatcatgactcactgcagcatcaacctcccaggctcaaatgatcctcccagctcagcctcccgagtagcagggactacggatgcatgccagcatgcccgtcttttttttttttttttaagagatgaggtctcactatgttgcccaggctcatctcgaactcctggcctcaagcaatcctcctgcctcagcctcccaaagtgctgggattacaggcatgagccactgagcccagcctttttcatttttatagaaagaaaaacagtaggaagaaagacatggtaaatacaagctaaaacttccgaagcttgccaattgcttacccatggcaaaggtgttatcatccatgttcttcgtcttcagttcctcctcggcaggcctgcagggcagaggagagagtacatggatctaataataccctgagaggtcacttctgccacccactggcaccttctgagcctctgtgctagcccaccttcacctgacagctgctgttttctcttctgctgcctttgtttatcccctcatcctaaaagtcctacagcctcattatagaaaattcgcaaaatacaggaaagtctaaagaagcaagaaaaacaatcacacatcagccagagacaactactgttaccattctggaaaatttccttccagatattctacgaaatcatttagattctacagacataatttcacagctagctttgtccatttaacagtaagaaacatcattatacacttttgcaaacatttcaaatggctgcttaatactcatatcataccattcccttcctactgagcagctaagttctttcatttagaggttgcaaagcaaaccagcaaacagcattgggcatagttttatcgacacttgtatcatttctttaggatacattcctggctatggaaagagaaaagatagaagaacccatcttttcggctgggcgtggtggcttacacctgtaattccagcactttgggaggccgaggcagggagaccacttgaggttaggagttcaagaccagcctgggcaacatgatgaaaccctgtctctactaaaaatacaaaaaattagctgggcatggcggtgcacgcccatagtcccaactacttgggaggccgaggcaggagaatcatttgaacctgggaggcggaggttgcagtgagccaagatcgcgccattgcactccagcctaggggacaagagtgaaactcagtctcaaaaaaaaaaaaagggccagacgcggtggctcacatctgtaatcccaacagtttgggaggccgaggcaggtggatcacctgaggtcaggaattcaagaccagcctggccaacatggtgaaactccgtctctactaaaaatataaaaattagctgggcgtggtggtgggcgcctgtaatcccaactacctgggaggctgaggcaggaaaatcgcttgaacccaagaggtagagattgcagtgagccgaaatcacaccactgcactccagcctgggcgacagagtgagagattatctcacaaaaacaaaacaaaacaaaacaaaacaaaaacaccttttctaagaaatggcaggtagacaagactgtgaggcagaggaaggaatgcaaatggagactgggagggaggtcacagaggcctgggtccctatgctaaccctctcgtccccgtatcagcctggcaggtcgcttcacctcctcactcataaaacagagccccggggagtcaggatgtgcactaagcacagggcagtcaagaggaatgaggatggacagccagaaatcagggcctgacacacagctgggattgaatcaactgtagatatttatgggtcttgctcctccttcaccaggccagtcagatccctgagtggcataagccgagtgcatttcaggtgggtcctcccaggggtggcatctcatcatggagaagtcactgttcttattctgaaaatgagtatcaagtgtctacagattaaggtaaatgagggaagcattgactaaaacctgagaggagctggggcgaatgcccacacctttttcttcctaagaggcaatgtgacattcttgatacttctgacaatggttgaaaaatttttttttttgagatggagtctcgttctgtcgccaggctggagtgcaatagcatgatctcggctcactgcaacctctgcctcccaggttcaagtgattctcctgcctcagcctctcaagtatcagggattacaggtacccaccatcacagccagctaatttttgtatttttaatagagacggggtttcgccatgttggccaggctggtctcaaactcctgacctcaggtgatccaccctcctcggcctcccaatgtgctggggttacaggcatgagccaccgtgcccggcctggttgaaactttttgaaaacccataaccaattaccttcacagaaacgagtatcaccatctgacccatacatagtacctactatggcattacacactgttctaagtgcttcacatttttttaaagaagtttttggggttttttggtttttgtttttgtttttttgtattttgtttttagagatggggtcttcctacgttgaccaggctggtcgtgaactcctggactcaagcgatcctcccatctcagcctcccgaagtcctagtactacaggcatgagccacggtgcctgggcaacatgtgttaattcaatcctcacaatcaccctatgagacaggtacttgtaatcctctgaagcaggcagtactattgtctccattttacagaggataaaacagaggctgagtaaatggctcaaggtcatacacttcacatcacaacccaggccttttggctcttacccagtcagctgctgcttcttggatgagggagactggggtcttacccaacccatctccatcctttctagaagtagatagagggaggcatcaatactagacaagatccctccctcctccttcatgcaggcttttctttggacctgcctttgcccacatattcattccccatttccctacctccatgggcctgggacatgcgtggctaggaggccactagacacagaatggctgcaagaactgctttctataaacaccctcggggagaacatttgaaccatatatacggatctagagtctagaagggaccgtctgtctttctctactgtctaggactcacaaatcccaccagaggtacttgaatcagaatactacagggcctagggtgggtgactctgggagcccagctgccacctcccacacatcacagatgagaaagagagattcagagcaaaccagcttggtctcacaccaatcccctccgtggtcctaaaatccaggtctttggacttttgtttcaacacaatttctgccaggctgcactaacttacttctttttgttaccatagtccttcatgacagaaaacatcctcctcctaggatcttctaaaccaagcctcttcaagaaggcccacagacagacagaaagccagccctcccacctgtgcgcagtagcaggcaagccttctcctccatctggcctagtccggacatatattacaaacaggcttctaaaagccactgcagtcatagatgtgagacagaaaaaggagaacactcaggaatcagctagccagcaggtaaaggactccacaattcagttggaggaaggagaaagaaaaacaaatacacaatcaatccttcagcccccagagcaccctttccatggctgaggagggcgagaacatccaaaaagcaggtcacgccattgagccaatcccaagatccacaacatcgacagaagcaaacaagtcgttctccaaagtcagatatgaaagcagaaagcacaagcatgtattgttcacctcctccaccatgggcccctctcattgacacaccaaggcatttgaaaaccttcacatctatccttcaaaacaacacccttcctttttacaaatgcaaaaactaaaactcaaggaactgcatctctacactcactgactacacaaccacgctggtaacaaacactccaggagggctccactttgaagagagtttgaaattgtgggcttaaaaagaaacaagttatctttgaaccgtctttcacagtaaaaactcaagggcagctatgacttcaatcaacatgaggatagtaagagaaatcaagtacaaatgtatactgactcactgatcggtaacagagaagaggggttcttagaaaaatggggagggagaagattaagaacaaaactgtacctgcagtatgcctgctcgttttcaagaaggaaacctgttcttttggcaccagccccacaagtaccacgtggcatcccctcaagggcagtgagccataggggccagggcacacagatctggaaaatcttggacatgcatcatttgggtgctagtgagcactagtcaagctggtgtcgactaaaaggggccatctcaggcctgcacgccagtctcctgggcgtgcaaattcctccggccatcaggaaacacaatggctgccaagctgataggccccgaggagaccagagggtgaggatttggaaagaggtggtgttggccccggcctaggccagccaagaaagccaagaaaggtgattcgccagtcacagagtaagcgagcgggtgagggctgacaagccctgtggagaaaagcaaagcagactttcagagcagtcacagactgccattgccaccaccacccgagtcctctggagcacccccagcattcatgttttcaaagaattttgccagcccaaagtgggtcaggcactgaaacccaaagggaaactcagcagaccccggctcccatgtagtcaacctgaagataacgctgactttccggggggatgagtggcttcagaaacctgccccacgatactcagaattgcagttaccctgagccatctgctttctgaaaagaacagggtttgaaggtggctgtgaaagccaccaagttatgtggggcactgctttgccttccccaacaagtgtgtcagcctcaactctgggacttgcgggtgatccagtggggtagagggagagcagtttctcgtgccatgagcttcttcaacagccatgacttcattctttggccacgacccatagtaagaaatccattctacatcataacccagcacacccacacgtgtaaacagacatataaataactgaaaaatggttgttcttcgagtgaaacaatacttacctttactgcatgtggtgatacactggcatttcttatgctatttcctttttctttttaatgcttgttgaaacccagtaaattgatttcacaactcaataaagggttaggatatgcaattttgaacaattccagctctgccacctatcagctgtgtgacctggggcaagttacttaacctctctgtgcctcagttacctcatctctaaggaggggataataatacctacatcagtgagttgttcagcagatcaaagaaatatttgaaaagtacctataaagcacttaacagtaaccccctccaaatttccattgagggaaactgaagctctgaaaggaaagcaacttgcccagtgttgccctgctggtaaaatgcatcacccagcctggtacagtagctaagagctggagcactagagcaggaccacacaggctcagatcccagctctgccactttcttagcacgtggcctcaggcccatgtccttaaccataatgccctaccaagttttctgtggcataaaagaggatcacgttcacattaattcctcactctacagaaaactaagatgcccctgacttgtcccgttcaactccagttattctggtttcccctgaggctgccaactcagatagcaggttggatccccatcccttcagttataggtgcactgaaagacagtgggccttcctgtgcatcagccccagtgacggatcctggagacaccatggtgagcaaacccaactaggaagcttacaattcagtatggaggaagacattaaaaaaatactcaaactcattatttcaacaaacatttattgagcacctgctaagtgccaggcactgtggcaggcctgcaggaatacagtggtgaatgaaagcagaccatgtccctacccctcacggagcttacagtctagcggggcagagagtcatccagcaaccccctaataaagatataactacaaactgcgatcagtgcctttagaaaaggaaagaatgccctagaataagggtccctggcccaatctacagggtcaggcagggcttacttaaggatgctgaaaagcaaaacgagcaagtggggaggtaggggagtgagaggctgcttgggaacactgtgggagaggtgatgaatgcagtccccgacaaggtgagtttgaggaattatttgggccatcagtcaagtggagatgccgagtttggatacatgaagctaagggaagagccaggagaaagagaagggccagagagttaagaggaaaaccagcagagtgtggtctcaaggcaagggaagacaaagtgttttaagtaggagtggtcaaccacttcaagaggaaaactaaaaaaccacctgcagaatctggcagatgccgggggctaacacttacgggggtgagcaagtgcagaaggcaagtacaggcaactctgcaggggtcagcagtgaaggggagggtgatgaggtgctggccagaagcaggagggagagaacgtggggtcagcggagacagaagggatgctggcacaggcaaaggtgaatagaggatcaagcaaggagggcagcagaaaacctgccaggagagaaaaggtgactgatgatgtcagattctagagcaagtagcagaaactgggacccagagcacaggagggagaagtggcctgagcaagaagggactcctcgtcatctgtaacacaggggagggaaatcagcgtgcagacttgggggccacaagttatagggagttccattcttatggcttctgttttgttttttgaagcaggagagaaagtctgaaggtaaagaacatttgaaagagtcacttcagaggagaaacgagtggatcaaaaaaatatagtagaactgctaggcagggtggccgatgacccctcgactggtggcgatgttcatctgctctgccatgggacattctctaacaaagcttagcacgtgctgggctgatgagtgctatgaaaaagccaggggcccgaggacactggggtggacaggctcccctggggaagtcctcttagaactgagggatcaacactggaggagactgcaaggggtacgggataaatgttcctggtgaaggaaacagcaggggcaaaggccctgcagcagaaaggagcgaggccctttggagtaacagaaagaccatggtgacaggagctcagaaagaccactggtgttaagactatgagccagtggaggccagattggggaatgggatgggagggtgcttgaagaccatggtgaggctctcttggtctttacttttaagaagaataggacacttccaaagggtagtgtcaagtgccaaggaagatcaggagggcttttccccacaccagccctaggactttggactctgggagcctcagtttgctcatccaggaaagagaaatttaaaaccctctacttcacagggaatgttgtcggaattaaaccagaccttgcatgaaaatatagtactcagtgaagtgcctggcgaagagcaggggctcagccaggtctcatacaacaaatcctctgtactccatcccacaagccctgtgacatcttaggaccactctgcatctctttccctgctggaacctagcactgtgcccagcacacagtaggcagtcaataaatgcttgtcgatgaatcatctctaagctttagagttaccaaatgcctggtccagcaacccagggaaagcagccatttgggtttctgaactctatcctgatggctaccacggacttctcccatgccctcacctgatgtggctgtgctcagtgcacagagggcctacagccaacatttcctcaacaggaagccctctgatagggctcccacaggtaagggatataccctgagatcctccgccatttcccaagagggctaggtcacaaagggtggctagtcttcaacagtgctgcaagtcactggcagcacacaggttctaaaacaataatatgttgaaatgtactcaccaagaaagccaccgacctacaaagaaacccttatcgctgatcttgcaatgagcaccaacctcccctttgcaagagctgagatcgaaagataaagaagctatcaaaaagccatctgcccacttaaaataatatcacaagtcatgttaggaaccacagacctggggccagataccaaaacaattgtctgaacaggctgcttcaatttctccttaaaaccgcccatgtatgttaaaagaaaaacaccctctccacccaccttggccctgcaaggttttgatttctctgttctctgcctttcacactctttaaaatgaccaaactcctttacccaaactgtcgcatcttacagacagggttcccatgacagccggcggggatgacagcttgggaaagtgatagaaatgaaggtagctctggggtactggacctgctcagtatcttcatctgggtggtggctacacaagtgcatacatatgtacaaatccactgggctatacacagaatatcagtacactttatgtaggtatacctcgataaagcaaaaaaaaaaaaaaaggtaaaaggaaagcacgacatgctgggaacaccaagagtgaaatccagaatttgccctgaatcatgccacgctttctagaggaccagtttaaaaaaaaaaaaatagaaaaaaataaatgtccctagcatttcttccctggccctgtcactcactagctgagaggctttgagcaagctggctcatctctctgagctacctgtctcccctctactaaatggggataatcatagcacctacacaacacagcatgcacagcaggcctcacggagagaatggatctgatgttcatagcacagaaatcagtaaatgctggccagttatcttttgcagttaccaccatgcttcagttaccttgcccatgtttgctgcattcaatccaaccatgcaaagtgactgtcatttcccttagcagagaaggaaacggaggcaaggccacacagctgatgggcggagccgaatttaggagaggaatccaggaaactgtaggtgtggctccctaaatactgacactagctaacacctgtatgatactactttgagccagactcggttctgagcacctttactcttatcccgtaaagtagatgctataattctgttttacaggtgagggtcctgaggcatggtgtagttaaatgcgttggccaaggtcacaaggccagtaagtggcagcgccaggatttgaacccaggcaatctatgccagaatccacactcttaatgctgtaagaaaaaccatgctgcctgccccctttaaatgaagtctcagattatggtggggctcacaggtgggtgagtgggtacctgcctgcctgctcagttacccaggcacatctgcccaccagaccggagctagacctttctgaaccactcacagcctaaggccttaccagaaccagcagaacccacaaatgtcttactgcagccaggggcttctgaccaagcgtatacatacaaggtccaaaaagcattttcccatttccattcccagtcctcccaggaacagggaaatgtatacattttagggagaatctagtgatcctgggccagacttaggtgaccgcaaaaagaatcaggactagctgctgcccttaaagaactcatagcttgatagaggaaacctagggaaatcttctggggccccctggggtataactgattatttctccctgtccctaaatgatcacaggtggtgtggcaaaaaaacaagggacaaaaacttcaagtccagtacccatctggttctgtctctctgctagagccactgctttcttgtgagagcatgggctcagcccctcgcctccacaggactcaaaagtagattacagcgttaacagtagagtgcacaggcttcaaggtcaggcatgggtgaactggaagagccaggtgccatcactgcctcaaccagtttctccacctctggaatcctggtttcctgctctgtcagaaagagaatctgctctaccccccactggcaaagcccttggtccacactatgtcattgcagttctctccactccagcacactgctgatcattcacaccaagctcatttccaccccaggactttgcacttgctgtttcctctacctagaacacccttgttccatatatgcacataactgttattcatcatccaggacttagtttaaatgaaacctcctcagaaaagtcctccctgttccttttcctacaaactctcccccacctccccaccgtatctgcataactcttctttatcatcattcgggactcacctcctcaaaggccctccctttaacagcatgtctgacacagtcattccctcccaatctatccccttactcccttcagcagctaactttgtccctatttatcctatctgcttgcttgcttgttttttcaaactgtctcccataggagcctgtatgaatccttgagggtagggtagatgtctgtcttgttcagggctttacagtggaactcaataaatggaggaataaaaccccagttaaaacagtgcctagcacgtgtttgacctccatcactctttgactgactgactcaatgcaccctcctccctgtcctggagagcaggcctgaggggttcctgggccggaatgcttgtcctccatcccagacacagccctgcgttggcggaggtggcgctggctgacattacctgcgcctcaccggcttcatgcagctcttcagctgcctggcctcagcctccacgggaccctggcactcgggctgtggctccagctgcggcagctgctgctgctggggcagcccttcggcatcagtgggtgtgggagcgggtgcgatccggagcaggactgtgtagttgcggccgtggttgttggcccagaaagtgccctcaggggtctcatagcgcaccacgaagtcgaggcgcgccccatcgcccgcgccctcagcaaagggcagctggaaggcaaagcggtcggtgcggccgccgtcgtcgggcgaggaggcggatgcctggccgggacccaggccgagccccggatccaggatgggatctcctgctcctgttcctcccgctcctgcccacggcgggctgcgcgggacgtagcgcgctgggtggtcgcaaaaggaagcccagccgtcgtgtgaggcccgcacgtgcaccgccttctcgaaggagcggttcagcacgcgtaccaacccgcgcagcaccggcgggcggcccccaggcacccacaccccggcacccccggggaccgctccgggaggcggcagcagcgcctccagctccaccatgacgcgccccaagcgctccagacggcccggcgcgggcggcagcgaaaatgtggggaccaggtaaaaccccccgccagcggggacggggcacagcggtgagggctcggggcaagcctcctcttcctcctccccttcatccccatcctcgccatcgtcgtcctcgtcggccccgccgccgccgccgccatcttgcccggccgccgccgccatcttgcccgccccgggcccgccccacggccggtagcggcgcaactgcgccagcggcagccccaaggcctcgtcggcgaacagcaccctccgcggggccaccgccgcctcgaccgaggtgcggggctcacccgcggccggcgaggggggcgcggaatgccgcagcgggggctccacaggggccgtacgcgccatatcggcggcggcggcggcaccgacggcaccggcggcgggaccggcgggggcagggcctgaaggggcgggcagccaatgggaaggccagcgcggaggggtacggctcacgggggcataggcggtgagatgaagacaagtattgcagagggccaatgggcagccatgcacggatgacgtacagcgaattgagagccggagaagcacgcagccaatggggatgcccgggagtgggcggtgtagggggcgggatgatcgaggaatcaatggagaggccggaatgggggtggtgcgaaatccatgatgaagaaaacagaagcagacagctaatgcggaagtctgagcgagagaggcatgtgggcggtgggaaaagtggaatggctacaggcgatgagggcagccgggaacgaacgcagaggcccaaaaagtgggagatcccgcgggttgcgtaggcggtggaacggtagctagagagagagaacagccaatggagagccacgcgtgggatgacgacaatggctgcagcgagccaatggggaggcttgtgagcgtgcactgcggcttcgaaggggtggtgccaaggtggagctagccaatacgaaggctaaaaggagaccaagaggcgggtgtgtagggagccgagccaatggaggtggaggctgaaggcgggagcgaggacgagagctggcggatagccaatgagggagccagggtgaaggcgtagagacctcaaaggacagtactagtatgggatgagccaatgccgaggctagatagtgcagcgggacggagggaggacttggaggcaagatggggaaaaaagcagagccgacgggggcagtgtaggtggtgtgaagggaggcatgagtagccaataaggaggctggagaggaggacgctgtgtagacagagtctgaggtattgggtggccggacagcagaaccatagaacgcaggcagccattaggaaaaatgtgcttctcagggatggggttaccctctccctaaccctccgtgactccccattgccccaggaatacccagagcccctgaaggcctagaccacaccttggtgtgtgaactaggaaagtgaaaatgactgtcctgttgcagttagttacttactgggtcctccctgcccaactacaaccttttcttgagcagtgccacaagccaagaatgcccctgattgttagccgcaagcactctccaggacttgatactattgttgaatgaatggccgaataggaaatttaactttctgaaggattcacttttttaaatttcagctcagcaaacactgacctgactgtgtgctaccagaagttgattgggcatatgggtagcttctgactaatggaatcacaatcaaagccctgtccttcttgcccaacctgacactccacaccccacaggggcctcacctcccttctttctgtccccccatctctgcttctactgttccctctcccaagagtgctgttccttctgctgcttccatctagtaaactcctttcgctctccctttggggtctcaccttctgtgggaactcaactgcagcttttgtccgctgaacacatccattcatacattccttctccatcctgggaagatttactgaacacctactgagtgccaggttctgagcatgctgttatctcattagaacctcacagcatcctaggagggaggtgatccttccagcagcccctctccccaggtctccatgttcaggatgtccatgagttagaaatgaatatgttcagctgcaagtaacagaaaaatcataaaataatgggggcttaagcaagacagaactttatttttttctcacctaaaagttcaagctggcaaatagtccagggactccttcctgcccacctggtttgggcattgtctgtcccgatctggctccaagactctcagtcttcaacaaatccttttggctgtctattaaaaatatttaccaaatccatcctcttctcaccacctccactgccagcactatcaccagtcacctagactactgcagtagccagctccttgctggtcccctgcttccacattcaggccctagaccccattgtacactcagcattcaggggcttcctgttaaatcctaacacggtttgtgtttctcctctgcttgcaaccctgtcatgccttcctcctcactcagcgttgaagccaaagtccttaccatggcctacaaggtcctgcgtggtctaacctccgagtcccctttctgacctcacctccagcttctcttcttgctctctccacactaaccacaccagcccccttgtagaccttgaacaaatcaggtacattcccacctcaggacctttgccctggctgtttcctttggagttcctcagatatctagctggctccctccctcatctccttcaagtctttgtcagaggcccctgtctctggggacttttcctgacccgtttaatcttgcctactcacccccaactcccagccctcccagtctccttcccgagaagccctccatgagagaggatatagtccagtatagaggggaggtagcgacctctacccctctctgccctcctgaccccagcccccattctgcaaggatcttggctttcagcagccgtagcatttccctctcacaccctgggcctgcccaaggggccagctcacattctcggccaccatcctcacttcgtttgcctcctatatctctggccactctctttcatggagtgagtgacagtaagggacagatggtctggggaaggtataaggagaatgcagcccacacctctgatcctgagagagaaaactagcccccttttccaggagggggacaggtgctggggcagggaacaatgcctctgctgatagaactggcctggtttataattacgcaggaggtgtagggaacattccgacccaagtctgcagggagcaaggggttattaactatgggaacatcagtgcaagggatcattaaccttaggaccatcactgcaaggggtcattaaccttggggccatcactagaatcagctccccaggactccttcctgacatgcatgctcctcaccccctcccttgctccctcccacatgccgtgacatctgttaaacacctgctgttcacagggtccctgcaggcctccaagcaggggacctcatcccaccttggtgcctcccctggctgtccaacacacccaagccatttttgggtctcagatgtgtcccaccaactcagaagcctcaaccagcgaaagttttgttttgaactaatggtggggagggttgggtgttttttttttttttttaattgttgttggctgatttttttaaggtctttttttttctattctttttttttttttttcttgtcttcacaaagccaggccatcaggcccattctgggcttttccagaagggtgagtctgagttgaggaaagaggccctcctttttacgagggcttagaaggttgggggaggaaagggggcaaaggggtgaaggggtggatcttggccaccagatttgtaccatgtaaataaaaagccctttccaatttctcttccccaggtctgaagccagtcttgtagagggctggagtggttgttggacgactagaaccctgggctttgcagggtgctgggagctggaagtcttcaccatggcctgtcaggagaagcccctgggggctggtctaccatgctgaccagtggttgaatagagtgcctgctgaggtcaagagatgcagccgccaattcctggacaacctaaaagcctcacaagcttcaagtctccaaggactctccaaatcccaggatctccctgccatcacatcctagaatttaaaacctgagaacatcaagttcaggaaagcttggggatttcaaagcccagcaccaaagaaagcgggacccacactcgccagctctgtgatcttgggcaagttgcttgactacttatacctccgtttccctcatctgtataacaggaatacaataatgatgagatggagctcaaggggccatggtgaggattgaacatgatcacttgtgagacatgttcagcactgtatctgacccatggaaaattcaagataaacatcagctactgagatgatggcggatatttggaatcctaaatccttggaaactggggctttttgaagtaaaagaccccaaaggctgagggcctcagaagcatcaggccatgatgttcctgaaacaagagggtcagggtcccaatgggcctctggggttcatcgtgaggatggatgcattaatattggggacctgctagggaccttcccagtgggacagtggctgggtcagggcactcaagccctaaaacgtgatgaggcgagacttttctctctttcctcattcagtaactgtcagtagattctgggagccagggattctccgactcttcaagtccatgaattttaggggatgacagtgggctctccgctttctcctccatgaagtaacttacatgcccctcaccctctgtgggaggggtgttgcagggggtgcagaactcccctcgccgggtagttcaagcaatggggaccatatcaattccatctatagggaaactgaggcctggagtagggcgaggcctctgggaacccagccctattctgtctctttccctggcatttcccatccacacatagagcttcagattctctttctttccccagagaccctcaaatatcctctcactcacagaatggtgtctctgcctgcctcgggttggccctgtgatttattttagttcttttcccttgttttttttttttcaaactctatacacttttgttttaaaaactgtggtttctcatgagccctattatctcattgatacctctcacctctgtggtgaggggaagaaatcatattttcagatgactcgtaaagggcaaagaaaaaaacccaaaatttcaaaatttccgtttaagtctcataatcaagaaaaggagaaacacagagagagagaaaaaaaaaactatgagaacccccccccaccccgtgattatcagcgcacacactcatcgaaaaaaatttggattattagaagagagaggtctgcggcttccacaccgtacagcgtggtttttcttctcggtataaaagcaaagttgtttttgatacgtgacagtttcccacaagccaggctgatccttttctgtcagtccacttcaccaaggtgagtgtccctgctctcccctaccagatgtgggccccattggaggagatggcagggaggtaggcacggcgggggggtcaggggccctctggtacagtgggatgtacccagctaccgtgattccagccaggtaaggtctttaaaaaaataataatagaataaatggcagaagacttaaaggtgaagtacttaatgcatgggcaggggcaaaaataaatgaattcatcaattgatacgtagatggataggatttttaaaatatgtcagctgccagtctttatggatttcagagctttgaacaacttgaaatgctgtccaggtgcaactgaaaatttcaactgcatctctctcatctctttgtctcttagctcttgatgcctctcatccttctctgtctctctgctcaccctgtcttgctcttttacatgtttctctgcctctctttctcccgccatctgtctgtcgctacactcagactctctttccccgcatctctcctggcctctgaccatctcccctatctctgtctcctccatcttgaccacactccatcgatctcctttcctccatctctcccgctctcttttcttgccttcccccacctgccttcccagccagcatccagcctagagctttgtacacagctggcgtttaataatagtaatgtcgccgaggacctttacattttatgagagtgagcatcagttctgttcaccctagtagcaggaggattgcaaggtgccggggcaagctgagcacttaactgaactttgcttgtatcgctttagaggagacccttggggcgggggggcagggagcacttcacaccattgtcaaccgtagtttagctgtgtggacctaccccaggactgcatgtgtgtgaccagagtccatattcaggaagcaaacaggttgttcagggctggggtgagctcgattctgcaggcttagcacagcgtttggcacaaagtaagtgctcacgaagtgttagctattagtatttctgtaaccaaattagaatcatgctatatattggttttgttcctgctttattcaattaacagtagtgtttttgaagcttactaaaaattgtttgaacacatgatctttcatgatggacaagactgtcctcacatcagcatgaactttgattgatttgaccaagtgccgattgttggacattccggttgtttctcgtttttttctataaacatccctgactgcttccttggattcctgaaaagggagttgctggggcaaagggggcgtgcatttttaaagtttatgaccctctctgctaattctccttccaaaaggttgtcctattttatgctccctctacttaagctaaccctaggtgagtattattatgttttaattatttcccaacatgacaggtaagaaaaacacattatcacattgttgaaatttgcatcttgtgattacttttactattcattggccattcatgcttttttttttttttttttttggttgtctggtcatgtccttactcctaatagggtgttcatcttatttttcccttattgatttgccacagctctttatttggaatggttattaacctttcatcagccattacatatatagcaaatattttccccaattcatcatttgctttttttctatttgtttatggtgttttttgtgatgcttatgatggttttatacagtcaaataggttagtctttttttctgtggcttctgtctctggttttgtgcttagaaagtcctttcctacttgaaaatgagataaatgttcacctatgttggcttctagtctcttttatggcttcattttttccatttactatagaggttaagagtgtgggtactggagccagactgtctgggacaaacccagcgtcaccccaagccctatgtgtgatttttagccaggcacttaacctctccatacctccatttcctcatatgtactgcaatggttataatagtaccttcctcaggagtctttgtttagattaaaatttttaaccacagtaaatacttagcacaaggcctgacacacaataaacccaagatcagcattaggtgttaaaacttatatcttgaatggatctgggcattttagggtatatgatgatggtgacatttcaaactgggcagggaggggttgttgggataatggactgactattcactcaataactttatcttctccctaattatctcagacacatttgttaaaccatactccatggtcctccagtttgaaatgccacattcatcacaaattcagttctctccatatgtgggtccatgtccaagctttctattctgttctcttccccagtatctgttcttataccagggccacactgttttgctgattgttgctttgcaatacaattcaatacccagccatgggtgtccctggcaccttgcccttctttattcttgattatttcaggcagcatcagttgaaccagccagagaccagcaaatgttcttatttgaggcaatcctcctctcgcacacatgcactctggctctccatgcatgtgtccatttctctcaatgtctctcactatctcttgttctctcttgctcgctctttgtgtgtgtctctttgtctctatgtatccctatctctcagccagtcccctggatagaggggcaattgtcaacttgaagccctgcagacacctaatgacttaaccagacagcgtagaagggccctggcccttgtctactccacgcctctccgtgctcagtgtagaagggcaaattgaagaccagagatctcagggcctcaccgaaatgcagcggcagagttgaaatccaagcctagatctcaggactctaggtgggaccctggttctggctctctccccaactgaaggcctcagtttacccctcagcacccagaagggggaaggggaacctgggctaccattcccccttctgccttctcacacgttggaccccaacttcccacaggttggacgatccacgatcacagtgtggggcccagcctcacaagagctgggctaggtgaggccccggactccataggtcaggaggcctagttggccagagcgtggtgatgatggaggcatgtcagtcagtcaggctgtgtgtccccagagctggtgctggtccccgaaaaccttgattgtggggcccctctagagagtctgatgatgggctctgtattggcgaaggctgaggcttttccagctccccccatgaggcccagaccaaaggcacaccagcctcaacctcctcctccccctgttgccatctctggcggagtggccatgtatttgggaacgttgttccagagtggacagggagactgaggccctagggaggctggctctgtttccaggcctggtaggcaagaggccctatgaagcagcaagctgcctgactttcagatggttccaaggagtttggacaccagggacactggcctacacatactgagactttgggaccgtagaccccacagtctgtggttttgagattctaggatcctttaaatctaagaaatgctgttctatgattctgaggtcctggtgttatactatttgaagaccccaggggtcccagtatctgtggagcctgcctggcactctcagagcttcaaacctgggtcctctccacaacccaagaagggccaggtcttcagagctaggggcttgtcatagtggccagatggacatcacctaccacatccaccagcacccatgtcaccccacctgggccaagcctgctgcaggacagggcagccagttctcggaacgaaacctgtggggtggggtatctgccctcttctcttcctccgtggtgtcgatgaagcccggcgcatccggccgccatgacgtcaatggcggaaaaatctgggcaagtcgggggctgtgacaacagggcccagatgcagaccccgatatgaaaacataatctgtgtcccagaaacatcccccattcagcttctgagaaacccagtcagaaagggacgtcccaacagacagtgcaggaagccggctgcccagcccggccctctaggtcctctacccccagacagatcatctccatgtccctgtctgagaatgtatctatgctttgctgagtcaggccatcccacatgtgtttggggagaattcttagctctggccaagtgtccaggcagcttcagaagtgaccacaggccagccacatgggccaggccagagtggtggaaaacatccatttgcaccgaaatcggtattagtttgttctggctgctataacaaagtaccacaactgagtggcttcagcaacagaaattgatcatctcacagttctggaggccagagtccaagatcaaggtgttgccagggttggttccttctgggggccataagggagaagctgctccaggcctctcccccagcttctggtggttgctggcaatctttgttatttcttggcttgaaggagcatcaccccatctctggcttcattcattcactcaccttctcatctcaccagtgctctcccaggcccttgttcggagcctccacagacccacactcctgtttctcacgcagtaatgttctaagcccccaggagactaagaacttaatacctggattctcacactcatctccctcagcaccacagctctgacaaccacccccaggaggtgacagcaaagaaaggaaggagcaactgctcccccagaacccttctatactcccccgggctgctctcagcagctgtgtgcccaactcagtgctgtgaggtggaacggggagatggagacacacacacacacacaccagagagtttataaaatgtgcacacggaaacacttcctaaagaaagaagtggagttctcaagtcactatgggactacggaactcggcatctgagcatccccttctgtataatggggttggctgggcagtcccttccagctctggcttcctctcagaccaggattataggatcctgaaaagccagtgcttccctcagggagtggaaggttctggggctcagcagggggcccggagccattgtggagggctttcaaggtgaggacaatagaagagcaggtcttgcgtggcttggacagggaaagaggagaaggagtgggcatttgaggcagggggtgtagcatgagccaggcttgagggccagaaattggggtgaactctgatgggggctgggtagagaagcttctacaggccccagctcaagagaccccatctctcctcctctctgtcacttgccatgctggatccgtgcatgatcacactcctggactcgcctccttgccctgagatccagacccccgtattcagctgccccctcagctcctccactcacatatttaatgccagactcttcatgtctatctacacctgcacttttgcacccaatccaactccccgccatgtcccccatctcaggtaatgtcagctcggtccttccagctgctcaagctaaaacccatgtcactttgactctccctcttgcccactacatccaagctgctagcactgctcctgatccagcttcagattaagtctcagaatctacccacttctcgccttctccactgccaccagcccattctgtgccagcatcatcacttgccaggactgttacaatagcctcctcactagccccactcacagcagccagatgaatcttttgagtccatgcctagtcactggggcaaaataggactccgaggagaaagtccgagaccagctccggcaagatgagcaaacacagcctgtgcagggtgcagggagggctagaggcctgaggcttgaaacagctctcaagtggagggggaaacaaccattgccctcatagaggacacatccacaccagggctgtgctagcgtgggcaggcaagccaggtgctggacctctgcacgtggggcatgtgtgggtatgtacatgtacctgtgttcttggtgtgtgtgtgtgtgtgtgtgtgtgtgtgtgtctagagctggggtgcaactatggggcccctcgggacatgtcccagccaatgcctgctttgaccagaggagtgtccacgtggctcaggtggtcgagtatctcataccgccctagcacacgtgtgactcctttcccctattgtctacgcagcctgcccttggacaaggacccgatgcccaaccccaggcctggcaagccctcggccccttccttggcccttggcccatccccaggagcctcgcccagctggagggctgcacccaaagcctcagacctgctgggggcccggggcccagggggaaccttccagggccgagatcttcgaggcggggcccatgcctcctcttcttccttgaaccccatgccaccatcgcagctgcaggtgaggccctgggcccaggatggggcaggcagggtggggtacctggacctacaggtgccgacctttactgtggcactgggcgggaggggggctggctggggcacaggaagtggtttctgggtcccaggcaagtctgtgacttatgcagatgttgcagggccaagaaaatccccacctgccaggcctcagagattggaggctctccccgacctcccaatccctgtctcaggagaggaggaggccgtattgtagtcccatgagcatagctatgtgtccccatccccatgtgacaagagaagaggactggggccaagtaggtgaggtgacagggctgaggccagctctgcaacttattagctgtttgatctttaaaaagttactcgatctccatgagcctcagtttccatacgtgtaaaagggggatgatcatagcatctaccatgtgggcttgcagtgcagagtatttgaattagacacagaacagtgaggatcaggatggcctctcacccacctgcctttctgcccagctgcccacactgcccctagtcatggtggcaccctccggggcacggctgggccccttgccccacttacaggcactcctccaggacaggccacatttcatgcaccaggtatggacggtgaatgggcagggaggagggagcaggtgggagaactgtggggaggggccccgagtcaggctgaaccacagcccacatgtgccccccagctctcaacggtggatgcccacgcccggacccctgtgctgcaggtgcaccccctggagagcccagccatgatcagcctcacaccacccaccaccgccactggggtcttctccctcaaggcccggcctggcctcccacctggtaacacctcagcccgtaccccatggcttcacagaacccccaagtccccagatccttggctgtgagcagtgtaggctattctgaattgcagtactctgggggtcaaaggtgtcaggtctcagaggcttggaaactccaccctccaaaaaacgtcaggtgcagaaccttaaagatgcagaatgtcaaaatcacaaaaccacagagctttacaaagctagtcaaaatgtcagcacctgcgaatggccgtctttaagcttctctgccagaagcctgggactttggggacagcagagccccctgggagtcagggttttcgaggctcaggagggtgggaagctcaaaatgagaggccttgtgggccaagctccagagcccagcccacagcctccataggtgccctgtccccacccacagggatcaacgtggccagcctggaatgggtgtccagggagccggcactgctctgcaccttcccaaatcccagtgcacccaggaaggacaggtcagtggacagggctgggaaggatcctcgccctcctatcccctcccctgacaccctctgtccccccagcaccctttcggctgtgccccagagctcctacccactgctggcaaatggtgtctgcaagtggcccggatgtgagaaggtcttcgaagagccagaggacttcctcaagtgagtggcccaggcctgtgccagtctaccggccctggcttgtggggagaggtctagggtgcagatctcagctcaggcttcatcccaataagtagtaagatgcaagagctaaactctgagactgtgggttcaaatcccagctccatccctgactggctgtgtgaccttggacaaattacttagcttctctcgacctcagttttctcgtatgtataataagaaacgtttgtgctgttatttacccccattttacagacaaggagactgaggccaaagaggttaagtgtcttgatcaaaatctcccagttcctgagtgacagagctgggatttgaacccatgtagccaggctctagaatctgcactcctgctttgccctgctactcctcatgccaacatgccagccttattccactgttcccaaagttctagctcctctagatggctgctgctgcctcccctcagtccccccatatgtctctctctctctctctctctctctctctctctctctctctctctctctctttctctctctctcacacacacacacacacaaatacacaccacactacacacaacccttagcagcaaccccacatgtcctgtcctccttgcagccaggcctttgcacaggccgtccctccacccagaatgctttgcccactctcacctccctggcccattctcaactcaccacacttccaacattatctccagcactctggccaggctcaagtggtgagttcaggcctgacatgcagtaggtgctgaggggcatgtgttaagggaacgaggggtgtgagagggagactgaggtagagaggggaggggagctggggctcagaggagagaactcccagagggtctgggccctccccattcagagcattgagccagaccaggcctgtcgtggtcacctgcatggaatcttctccctacttaggcactgccaggcggaccatcttctggatgagaagggcagggcacaatgtctcctccagagagagatggtacagtctctggagcagcaggtaatgccagggcggtggagggtaagggatagggatagtgcgcaaaaccttctgtccaccatgtgccagaaaccaagttcacctgggacgagggctggtataaaggaaggaagaggagcgggcactcccagggaagaccgtagcctgggcaaagatgtggcagagaagggccaggctgaggcctcatgtttgtgccatttcacagctggtgctggagaaggagaagctgagtgccatgcaggcccacctggctgggaaaatggcactgaccaaggcttcatctgtggtgagcgaccccaggactggtggtggcagactcagactgctggggggcagggaggaggtctgcacggtgcagggaacctaacctcacattcaggtcctgagagctaggggcccctgtccccagctccaaacatgcccagacctggaaatctgtccccttctacttacaaaccctctgaccccggctgggcgtggtggctcacgcctgtaatcccagcactttgggaggccgaggcgggtggatcacgaggtcaggagttcaagaccagcctcgccaagatggtgaaaccctgtgtctactaaaagtacaaaaaattagccaggcgtggtggcaggtgtctgtagtcccaactacttgggaggctgaggcagagaattgcttgaacctgggaggcggagtttgcagtgagctgagatcataccactgcactccagcctaggcgacagatcaagactccgtctcaagaaaaaaaaaaaaaaaaaaccctctgactctaagatccccaaacactgtgatcctgagttgttaaagcaaatgcaaatagccagacttgccagatgcaggctgtgtgccagcaggaccagctatgtaacctgcagggccccttgttcagatttcaagatggcgaccacagagcattaaacaaagcacagggtgccacataaccacataggtcacacgcccatgaagccagccctggaggccaggcactgtttctgagcgctttgctggtggtaatttatttctcatgatgcgaatgtacagatgaggaatattgaggccaggggggtttaggtgactttcccaaggtcacagttgggtggtaaagagccctattcaaccccagttcatggtcccagcatcagtggccacatacgacatccgcacctgtgctctaataaatacggctcatgctgttttgtgggattccacctcagactggaatttagaagagggcgtccttgctttgaaaaacactgatttaaaaataaagtggagccaggcgcagtggctcatgcctgtaatcccagcactttgggaggctgaagcgggtggatcacatgaggtcaggagttcgagaccagcctggctaacatggtgaaaccccatctctaccaaaaatacaaaaattagctgggcgtagtgacgggcacctgtagtcccagctactcgggaggctgaggcagaagacttgcttgaatctgggaggtgggggttgcagtgagccgagattgcaccactgcactccagcctgggcgacagagcaagactcagtatcaaaaaaaataaaaaacataaaatagaaagtaaaaagtgggaagtttaagcctctgggtcaccagcctctccccctcacccaggcatcatccgacaagggctcctgctgcatcgtagctgctggcagccaaggccctgtcgtcccagcctggtctggcccccgggaggcccctgacagcctgtttgctgtccggaggcacctgtggggtagccatggaaacagcacattcccaggtaagaatggtccttgcactacacggtgcccccaagctcctaatcctgacaggctctgggtggagggtgcaaaggagctccatgctgccccttcccaccaccaccaccactgcagctgccgccactcagcctttgggaaaatgcatccgctcacaaaagcttcctttcgggatgtccgtggcctgaaagccccccatatggtctcgagtgtcgggcccctagccctgactcccttggggattggggccatgcctcacccactctggactccagctactatattcggccatcagaagggagggaccctgctaagtaattccaggagcacctcctttcctcccctgaccaaggaaaatcggggtggattcgcccgagctcacctatccactgctctccaccaggcctggcctgtgggcttagcagggatcagagaccttgactgtcatcctggctctgccatttaacctcttgcatcctttggtgtgcaagttactccgcttcttttcaacctcggggagaactattttggcagaagtggtgcaaagaataaatgatacaacttatgtcaggtgctcagcaaacagtacctgtgcccgtggacacgggtgttgacggtgagatctcaggcctgtagactcaccttgtagggggaggggacagggagctagctaggaggtcctgcatggggcttgattcatccccaccctctgacagagttcctccacaacatggactacttcaagttccacaacatgcgaccccctttcacctacgccacgctcatccgctgggtaagcagggcagctcggccccaaggaggaggaagacaaagatggggtgggggacctgcctcccaaactcctgtctccctctgagtgccctcagagtgggttcctccattcccaagccccagccccaaggatccccaagccgtgcctcaaatgtgacccctcatgctggcttcaccccaaacctgtccgcaaatccaaacctaaaccaccatccaggccagagcatgccaaattctgaccctaaacctacccctttccagatgtccacctcagccccatacctaaccctctcctggacccataaaatagcctaaagctaaccccatctctgcaccttgccctaaacgtaccccagctcttactctaactccttccccagcctttatgccaacccaaccccatctccttccctggccccaacgtaccccagtatgtcaatacacccccaactgggcaccattcccaacctttccttgtaacacccatttgatccttaacttcatcaccccatcccaactccttcatctcagcctccccaatgccttctcagaaccttcatcctagcgccacacctaaccccaaacctgaacctcacccctacatgataccagatattccccgactgtctctgaactgaaaccctgacctagccccatcctgactgatagcctcactgcaatcatcatcgctgactctgtaatcccattcctgaatccaaactgatcaaattccctgaccctcagcctcactccacaccgaaccccacaactaacctcatccttgccctgagcctaaccacctaaccatgtccctgacacgtaagatactcgataattcaaaccatctctggcttctgacctaaagccaagtcatcccatccctcacccctagaccccccacctgagtccaccccagcctgactcttaacccaccccttccctgacccttaagttggcctggccctttaccccttccaaatccttgaccccacttctgacccttcaccttccccaaccctgaaatgtcacctccacagagaaccccaactccaactccatcccagacctttcacctcacttcagccctagccctgaacaagaccccactcccaacctcagtcctgatcccttacctaatcccagaacaaccatacccacacccatctaaccctgcccaacccgacacttcaccccttttctaaccccatctttgaccccatgcttcaccccacatctagtcctgtccctgattacctgcccctacaattccgcccccatgtcagatggctcggggtaggtcatagcccctctaaaccccaagtttggggaatgtgccccttaccccaccccccaacttccaggccatcctggaggctccagagaagcagcggacactcaatgagatctaccactggttcacacgcatgtttgccttcttcagaaaccatcctgccacctggaaggtgagctcctctgaggtggcggtgactgggatggcctcaagtgccatcgcagctcaaagtgggcaggcctgggtctgggctcataggcacattggggaggaacgggatgtgggttgttggtggtggctgctggcctcagaggttgacgcccacctgctccctgtccccggccttccacagaacgccatccgccacaacctgagtctgcacaagtgctttgtgcgggtggagagcgagaagggggctgtgtggaccgtggatgagctggagttccgcaagaaacggagccagaggcccagcaggtgttccaaccctacacctggcccctgacctcaagatcaaggaaaggaggatggacgaacaggggccaaactggtgggaggcagaggtggtgggggcagggatgataggccctggatgtgcccacagggaccaagaagtgaggtttccactgtcttgcctgccagggcccctgttcccccgctggcagccaccccctcccccatcatatcctttgccccaaggctgctcagaggggccccggtcctggccccagcccccacctccgccccagacacaccccccagtcgagccctgcagccaaacagagccttcacaaccagccacacagagcctgcctcagctgctcgcacagattacttcagggctggaaaagtcacacagacacacaaaatgtcacaatcctgtccctcactcaacacaaaccccaaaacacagagagcctgcctcagtacactcaaacaacctcaaagctgcatcatcacacaatcacacacaagcacagccctgacaacccacacaccccaaggcacgcacccacagccagcctcagggcccacaggggcactgtcaacacaggggtgtgcccagaggcctacacagaagcagcgtcagtaccctcaggatctgaggtcccaacacgtgctcgctcacacacacggcctgttagaattcacctgtgtatctcacgcatatgcacacgcacagccccccagtgggtctcttgagtcccgtgcagacacacacagccacacacactgccttgccaaaaataccccgtgtctcccctgccactcacctcactcccattccctgagccctgatccatgcctcagcttagactgcagaggaactactcatttatttgggatccaaggcccccaacccacagtaccgtccccaataaactgcagccgagctccccacatgctggactatcaccccatataagggttgcggtcagtgggcaggggtctgggtccaaggccgcagcaggaggaactggacagcggaggaagtagctagggcatgtgcttggccactgcctccagcaccccaaatccctgcctgaggctggggagagacctctgccggcggctcctcaggcctcccggacccggcctaggaggccagcgttctcctggcggagggctcggtagtcctcccggatcttctccaggttgctgagggtcttcttgcccagctctgtctcgatctgaggcaatgtgaacacatgccccctcagcacacacagcccctttcccagctcctgctcaccagcccccatcacagccactctgggcccctcccaccaactccaacagcctgctctgtcccatggccaggcctcgtgtggtgttccctctacccaaagcatccttcgccatgtggcaggattccccctacatctttaagctgaagcctctgcccatggccctgggaggcagacaggagggcccttggggtggaagctggggctcacagtaggccacttgcctgtcccaggtcacaggcactaaggggcagggctgggtgtccagccatcggctgtgtgtggctccacagcctctgtcagcataacctgaggaactgtccccccggcccgccttggctccccatcctgcccccaggcctcacctgctcctcgaggtctcgaacctcccgcatgatggtgcctgtgtcctcgatggtctggatgagctggctgcagttctggggacaacaggagcagaaggcttgcacccagtcccacccacccccagcagccccaccccaggcacatgtctcccctcacctcgtgcagagcagctagatacttataggccttccgaacagcatcgtccttcttggcatcctgaccagacacagggacctcaaaggtatcagtgggctgcccttgaccatctccatgccctaagaaggccaccctctcccaccaccccactagcttcatcctccatgaaacaaagccagccctgggtatcagtgcacctccagcctcgcacagggcctgggtctggaccccagccagccaattagcagatgcacaaggcagcagcccagcctcaccccactcacccccgcccaacctgccccacaccttgaacacaagctcatcagtcaccgcaaacgtccggtccagcttcccagatagggagttgatttccttctgaagctccttcgtatcagacaagatctggcagacaccatggcagccatgagcccctgcctggggcaggctggctagcagtggagggtcctcatgtgtaccagacagggactgtgtcactgtgtcaggggtgactgggatggattgtgtgtgactattctgtgttagagtgtgactggacagctctgcctgagggtgtgaggtccctgtgcggccacactatgcctgacagcccacatgacccaccctccatggccctggcagtgtaccttggtgatctcttccttctgcttccggatgttgcccacgatctccaggatgcgctgggtgtaggccagccgggacacatctctgggcagagtctccagctctgacatctaggcagggatatagcaggcactgccccaggaccatccccccaccctcctaagctacccaggtccctcacacaggccttaccagctgcttatagacctcctccttcctgcgggcctcttcagcagccgcccggacactctggtgcagttcttggatctctgccagccgtcgagaagattccagctgccatgagcccacaggcagaagacagtgagcagagcatagggatggccccctagagagggaccgagcctgccctggcccgcccacagcccagggccccactgcttacctctctgcaatcctgcagctttcggaggtggcggtactcagcgaggagtgggacccggtgcttctcccactgacccgccaagtggatgacccgctgggcactattctccaccacaagctggtgggggatgggtacatgtcacacaggctgggccctccaaccccaccccaccccaccctgcccctctccgcccagctacagccccaaccccacctgcagcttggcaaggttggcagtcccatcgggcagcagctccaccgcgcggctcttcaggcgcagggcctgctcacgctctgctgtactgagcttgctgtgccggcactcagactctgcctggccggtggatacccagtcacatgccacagcccccatggagctccacagatgactgtacacccctgtggcccccacaggcctctctaacagctccacgctggtgccaaggaccccgaggaccccctaatcccctgtccatgcagacccgtgggtaccccacagatgcccacagaccctccgaggacccctcaatcccctgcccatgcagacccgcggtgccccatagatgcccacagaccctcaccctggcctgattctcatagccaccctcaagaggcccacagatccctaatggctcccaggaacccttctgccatgtgcagacctctacagagcacctcttgccccatctagtccctcacaccccgaggccctccttctgacctagcccaacgcgcagcccctcctccgccccttacctgcacaaagctgacgcccagggtcttcatgtcggcctcaacctcctcaatgctgcggttcactccttccagctgctcccgaagggactcgagctcctgttcctgagctgcccacgtgacctgggaggcccaggccagtcagggttggggtgtcaggcccagtagacaagcaagggcctgggacacccccctccaaaccactctgctcacctgttcaggccgccgggaggtggctggcacatctgacacctgagtggcctgggcctggggctcctaaggggagtgacgaggggcatcctggctgccagggaaggcccttcctcacgtggcccagcctcagcctcccctgagaactgcccccagtgcggcatgcatgcccactgaagcaccgatggtggccagactgtgactatgtgggtaaaggcaccatctgcaacctcgggccagagtgcttgctcgtggagaaatctccctgaccctgtcacagctcctacccacctgccccatctctcaagcctcaaatgcccatgagaaggatggggggccctcagagtgaacatcttaggacagaagatatgctcaaaggaaactgcctgaggaaagggggtgttgccccaagaacacccccacacctttgcatggttcccacctatccacattttctccagtcaagtccctaataagctaggggacccctctgggtacccatcccacagtggggcgagggcctgtccagtgggaacacaggaacctgtgtggataaaggtgtggtgctgacacaaaaagccaccctccaagcctgccacgcccatccacacatctcatgtcctcaggcgcacccaccagatggaaggtgaacttctctgagtgcgtgaagcgggagcccttaggagcaccagtcttggccccagcaccccaggcctgcagcagttctcccaggtcccgggcttgtatgggggccccaagcaggccccagctttggcgcagatgctcagtcagttgcttctgcagccgctgccgctgagcccgtgtgtcctcctggggagaaaaggcgggggaagcaggaaggtgtaggggcccacctagcacccaaggccctgcctcctccaaggaccccctgacaagagtatacagacaagtcacccccaccctccagccttcccactaaggcaggccctgctctactctcctgctccaccagcctgggatctcctcgaggacaggggtctcctcttgctcacagacatacttctctccacccactagatccccatgctggagaaggatgtgggaagagaggggggtgggcctagagcccccaaatccaagagaagcatagacaggatatcgggggacagggcagagacagggaatcaaaggtaccaagcacagaaagaggcagagagagagaggcaagagagggacaacagagtttcaagataatgggaaaatctgattatgaactcaagtattggatggtattaagatatcattgttggccgggtacagtggctcatgcctataatcctagccctttgaaaggccaaggtaggtagatcacctgaggtcaggagatcaagaccagcctggccaacatggtaaaaccccgactctactaaaaatacaaaacttagtgtgctcctgtaattccagctacttgggggctgaggcaggagaatggcttgaacccaggaagtggaggttgcagtgaagcgacatcacgccattgcactccagcctgggcaacagagagagactccgtctcaaaaacaaaacaaaaaaaaacaaaaaacaaaacaaaacaaaacaaaaaaaaacccacaagatattattgttaacttcattagccatgaaaatggtccagtggttaccttgaaaactgaatgtccttatgagttaagagatgtagtcctaagtatttagagctgaaatgacatgatgtctgagatttgctttaaaataatacagcaacaaagaaaaagttgggagagaaaagatgaagaaaagttggcaaaatggtacataggattcactagaatattctctctacatttatgtttgaaaattactacagatataaaaacaaaaacagacagccaggcgtggtggctcacgcctgtaatcacaacactttgggaggccgaggcagatggatcatgaggtcaagagatcgagaccatcctggccaacatggtgaaaccctgtctctactaaaaatacaaaaattagctgggcgtggtggtgcatgcctgtagtcctagctatgtgggaggctgaggcaggagaatcacttgaacccaggaggcagaggttgcagtgagctgagatcgtaccactgtactccagcctgggtgacagagcgagactccatctcaaaaaataataataatgataaaaaaataaaaatgtaaaaagacacagaggtgaagacagaaagagaggacagataaaaaagtggacagaccaggagggggccgacacagaggtggagaaaaagaggggcagacagagatgtggacacagaggaagaggagacagataaagaggcagacagaaggggaggggggccaaatacagaggtggacagagaggaagaggggacagatgtaaaggtggacagaaggggaggggtactgatacctgggtgaacacagaggaagagggaacagaaataggagagcagaatggagggagggaaaaagagaagtggacagagaggaaaaggggacagataaagaaatggacagagggagagggtgacagagaggtggacagagagaaggaggggacagatgcagaggtggacagaggaagaggggacagataagtggacagaggggaagaggggacagatacagagatggatagagaagaagaggggacaaagaggttgacagagaagaagagggggctcggcatggtggctcatgcctgtaatcccagcactttggaaggccaaggtgggtggattgcttcaggtcaggagttcgagaccagcctggtcaacatggcaaaaccccatctctacaaaaaatacaaaaattagccgggcgcacgcacctgtagacccagctactcagatgcctgaggtgggaagattgcttgagcccgggaatttgaggctgccttgagccctgatcatgccattgtagtccagcctgggtgacagagcgagacaccgtctcaaaaaaaaagaagaagagaggacagataaagagatggacagaaggggaggagggacaaatacagaggtggacagagaggaagaagggagagataaggggacagagggaaggggcaacagatacagaggtggacagagaggaagaggagagagattaagaagtaaacagaggcagaggggtgacagatatataggtggacagcaaggaaggggagagatacagaggtggacagagcagaaggggacacagataaaaaggtgcacagagaagaagaggggacagataaagaagtagacagaggagaagggggaacagatagatagacagagcaagagaggaattcagtacagaaacgaggagacagagaggtaagaaagaggagcagcaaaaacacagaactagaataatggggacaggcagaaattgtgcaaaaacctagaaaccagaaaaatgaacatcagtgacaagtgcagaaacagagaaagattagggccgggtgcggtggctcatgcctgtaatcccaacactttgggaggccaaggtgggcagatcacctgaggtcaggaattcgagaccagcctagccaacatggcaaaaccctgtctctactaaaaatataaaaattagccaggtgtggtggtgcaagcctgtaatcccagctacttgggaggctgaggcaggagaatcgcttgaacccgggagatggaggttgcagtgtgctgagatcacgccactgcactccagcctgggtgacagagcaagactccaaatgaatgaatgaattaatgaatgatgaaggcaggtagccaatctggattgctccagttgccaggaatctcaagcacattattcagtctaactactgccctgagaggagagcactattactaccccaaattttagcacaggaaaccaaggctctgaggagggatactgacttgtcccaggttctccttttttctgactccagtgttctttcaggtggggagctaggtaagcacacacagaggggaaacaatggaagggagggacaaagtggggaaggagagcagaggaccagcgggagtgtcagtgagcagcagcccagacagcagggagccaggcatctggctgtacctggggtgggaggcgggatgtccggtggacccagtcctcatcccctggccggtcccggcccgtctgctggcagagctgcagggcatggtgttcgaggagcgaggccacccttccaacaggctgaggcacctgggtagggactggaagcagcaggggactcgcctggaactcccgtggctctggaggcaggaacagagtcagctggccctgccgcatggcaacgctatgaggttcccccccaccttcctcctcacccctccccacagcctcatgctcaccacctctggaactcaattctggcacgaccagcctgctggcatggaaaggcttctggagggccgagccctggtgggagagcaggctcagaatctccagggtgaagtgggatgagggttgccaggggtagggggccaaaaccctgggcacccagacggggacaagagaagatccatgggagtcaggggtctcacctggaggtgctgcagcttgggagtgcgaaggtggggcgggacccaaggcagtgccagctggtcccgaatttggctcccaatggcccggaggagaatagctgagtcacctatgggggatagggaggaagtgaatcagatgtcaatgctgcaaatccaaaagggcataccctaggagaccagcctccactcctgacccccatccagagatacacatctatccagcttgcgttctcacgttcagtcattcaacaaacaccgagcacctactatgtacaggtcgctgttctagacactagggctacttcgtggaacaaactggataaaggtccctgccctcagggagccggcaagctagcagaggagagagatcatgaataggatcctgaataccatccagactgcagccaggtggggatcaggagagggctgcggagaggaggttaacctcaaagaggtaagggagtgaaccatgagggtacctaggggaaaggtaaccaacgatacaaaggtgcagaggcgggagtgtactggggtatgtttgagtagcacccaggaggcccaagtggttagagcgaagtgagagagagggagggcacaggggttgagtcagggaggcccctccccgcaccaacgcaccaccggggtcagctcaacctcagccccctgccccctgccctgtagcccctctctgatgcctaatcctcctgcctagctctcctgaaggcacataccgccacccctacccatcaacctttttaccacctctacctctctcagccctacagcccctagaaggccctcctctcccctcaccgcccccgcccacatcccagacacccagtacctgcaggctggtctgcatcctcagaggcatcggtgggcagacgctcagccaagaagagaagcaggtctcggaggtcaggctcactggggtagaggaagttctgatagccaagctccaagggatagcccaggtcctgagggttggtgggcggctatcaggaagcaggcagggtcctcctgccctgggagacttgggcctaggctgaaaacgctcccactttctcactaaccaccaccctcccaacctcccccagctccccaaggcctctgggccctggggggagtcacagagtgatgatagtcaacgctacagagaacaagaaacaagattaaagctctggcctttctatgactcaaaatccagaggccataaaagaaaagatgggtacttttgaatacatgaaaagaaagaaaatatttaaagaaaatagaataagcaaagtcaaaagttaatgacaagttgggaaaaaatatttggagcccatatcataggtaaagagcaaatctacctattatagaaagagtgcctaaaaataaacaggacaaaaagaccagaagcacaatagctcagaacaaaaggactcatgagggttctgatggggactgaggaaacaggccaggagagaaagaaagcctttttcctttttttttttttttttttgagacagggtctcgctctgtcgctcaggctggagtgcagtagcgtgatcttggctcactggaacctctgcctcctgggctcaagtgatcctcccacgcagcctcccgagtagctgggattacaggtgcatgccaccacacccggctaatttttgtattttcagtgtagacagggctacaccatgttggccaggctggtctcaaactcctgggctcaagcaatctgcccacctcagccacccaaagtgctgggattacaggtgggaatcaccacacccggcctaggaaagcctttttcttccagagttgccactgctttggaactgcatagactctgaaagcagacttcctggattcaaacccaagctttgcctcttaccaactatacgacctcaggcagatcacttaatccctctgtgcttcactttcttcatctgaaagagggtataccaacagtacatatagcagaaggttgtcctgagaattaaatgagttaacaccatgttacttaccacagggcctggcacagagtacacttagaagccatcattattctatacttaggagtatactgggtcacaatgcaagatatatttattttggaggctcaaggtcaaataagtataaccactggcttttaaggtattttactttggattttttccacaatatgcaatcaaagagctgtgactgatatagaaactcattccaggagtggggaaggtgccaaaatatggaggtggctaaggtgcagaaactgttgccaggagcagggcatatgaagaaaagatgccagaacatggcagtgctgagttgcgggggggctacagggacagcacacagctggattaagagaactccttttgcctgctgctgataaaccaaggctgctgggggccagacaaccatatgtacctgttttttatttttttggaaacaagagtcttgctctgtcgctcaggctggagtgcagtggtgcaatctcgactcactggaacctccgcctcctgggttcaagcgattctcctgcctcagcctcctgagtagctgggattacaggcacacaccaccacaccaggctaatttttgtatttttagtagagacagggtttcgccaggttggccaggctggtctcaaactcctgacctctggtgagatctgcccgcctccacctcccaaagtgctggaattacaggagccaccgtccccagtctttttttttttttttttttttggagatggggtttcactctgtttcccaagctagagtgcagtggcgcaatcacagcccactgcagcctggacctcccaggctcaagcaatcctcctacctcagcctcccacatagctgggaccacaggcgtgtgccaccatgcccagctattttttttttattttttgtagagatgggggtctcactatgttgcccaggctgatctcgagctcctgggctcaactgatcctcccacctcagactcccaaagtgctgggattacatgcaagagccaacgtgcccagcccacatgtacctcctggccactggaaaagccatagtcactaacccccactaaaatcaatgtaagcaaaagcaggtgaacaaaatccaagagagacagcactgagggaagaacagagaactgcaggaagcctgagcccccacctcaacacctcctgctgtgtactctcctctgcaaacagaagacataacttcccccctattaagtgctaaccttaagaatacatacagtcctgggccaggggacagactgcctgcctcataaggccaccaagagccccagagagaacaatgtgacaactcctgagagctgggtgaacctgagagcgaagggatggatggagctctgagacctgttgctaagagacagaaactgcataagcaaggcccaaatttaacaactctagccacccagtcccctatatctaaatgaaagttttcacggtagttactctatcgtccctccaccaccatatacttcctgggtcagttcaaagtgtttccattcactatgtattcacaggttccagatcggacctatccaataatagtaatcccatttatgcaaagcttattataaccagcttttcacacattaactcatgtttaatcctcacagcaaccctatacagtagctacaattcttatacccattttacacatgtggaaacttagcctcaaaaaggttaagagagccagacgcggtggctcacacctgtaatcccaacactttgggaggctgaggtgggtggatcacaaggtcaggagttcgagaccagcctggccaagatggtgaaaccctgtctccactaaaaatacaaaaaaattagccgggcacagtggcagacacctgtaatcccagccactcggcaggctgaggcaggagaattgctggaacccaggaggcggaggaggttgcagtaagccgagattgtgccactgcactccagcctgggcttcaaaaaaaaaaaagactggcccaaagtcacagagtgagtgagccagggggagtggcattacttgcagctcttgaatacaggaactggactcctggactcagctctatactgggaatgggtgagtgtttcatcagaatggctctttaccaggcacagtggtgcacgcctgtagtcccaactactcaggaggccaaggcgggaagattgcttgaggccaggagcttaagaccagcctgggcaacatctctacaaaagcgagaccccatctctacgaaaaatttaaaaattctcgggcagggtggcatgtgcctatagtcctagctactagtgaggcagaggcaggagaatctcttgaggccaggagttcaagaccagcctgggcaatatagcaagacacttacctctaaaaaaattaaaatattttttaaaagaaaagcactttatttattctgtcacagagacattgttggaattgctcttagcagaggcaggatatgtggttcccacagaggtaatatagcagacactcttttgggtaaccagcatgcctttctttgggtaatcatccttatcccaactccacaggatcctgaaggagtggctaatcacagtgtcctataggaatgaccgtgtcggccgggcgcagtggctcacgcctgtaatctcagcactttgggaggccgaggtgggcagatcacgaggtcaggagttcaagaccagcctagccaacatagtgaaaccccgtctgtactaaaaatacaaaaattaactgagcatggtggtgcatgcctgtagtcccagctactcgggaggctgaggcaggagaatcacttgaacccaggagacggaggttgcagtgagccgtgagctgagatcacgccactgcattccagcttgggtgacagagagagacttcacatcaaaaaaaaaaaaaaaagaaaaaaagaaaagaaaaggctgggcacggtggctcactcctgtaatcccagcactttgggaggccaaggcaggtggatcatgaggtcaagagattaaaaccatcctggccaacatggtgaaaccccgtctctactaaaaacatgaaaattagttgggtgtggtggcacacgcctgtagtcccagctactcgggaggctgaggcaggagaattgcttgaacccgggaggcagaggttgcagtgagccaagatcgcaccactgcactccagcttgggcgacaaagtgagactccatctcaaaaaaaaaaaaaaaaaaggaatgaccatgtcatccagactgggccaatcagagcacagagtgattagtttaggagtatatgacccagacagagtattttctggaactaggaaatggatactatggggtgggggtggtattttgcagctaaatttaaaacatagaagccaggagcagcccaggtgcaaactggataaactcatttgctcctcataaaagcactacatttatcatctccatttcacaaataggaaaactggggcccagaagggttagggtcacacagttaccaagtggtggggctaggatctaaactactcaggcagtttggcagtacagtcagcagccttaaccactaatgaaaactaagccgcaggaaaaatgacagaggaaaggcaagtgttgcagaggaaaggcaagtgttgcagaggaaaggcaagtgttgcaaaggaacttggttactttgtaaaagaggaagaaagaggatgtgtgcattaggaggagggccactcaccatgcaggcctgagccaggctcatggccaggcggaaccgggcagacatggcaagaggcagcagagggctgaggccagagcccaccgcagggttgatcacacgcaggcagcggaccacagcctctacaaccagctcagtggtgaaggcgcgcaaggtctgcacatctggaggaactgccctgaagaaggggaccagcttgatcacaggaatagtcaggcaacagggatcaggctgagccctgcagccttttggaaacactagtaccagggtcggggcagggaggatgcctacagttcagacagatcctggatgttggtgactgtgacttccatttggaaaaccaggaactagggaaatcctcaagtcctaagatcttggagtaggagaatggtgggtggaagagaactcagtttagaaaaatatcaaaatttgggagtctgggaaggtgaaagggtccaggtggcacaatctctgggtttcttggttcccagatagtatgttctttgcatacatattgagctgctagagttttgagaagactagattttaggaggctgctgttttcagaagttccaaatgtcagggtccctgggtatcaagatccctgaatatcaagaccacctagtttcaagcaatacaaaaatcagactccctagatgttggcatcctgggtttttagggcctctgaacggaggagtcttcgtgcgtcagggtgaccaaatgctgatgtcagattttagaattctgggtttttttggctgggcgtggtggctcacacctgtaatcccagcactttgggaggcggaggcgggcagatcacttgaggtcaggagttggagaccagcctgaccaacatggtgaaaccctgtctctgctaaaaatacaaaaattagccgggcaaggtggcgcacggctgtaataccagctacttgggaggctgaggcaggagaatcacttgaacctgggaggcggaggctgcagtgagctgagatcaccccactgcactccagcctaggcgacagagcgagactccatctcggaaaaggaaaaaaaaaaaaagaatcctgggtttttttaagccccaggtgtttggggaactggagtttgaaggatcccaagtatctggtccagggattttttggagtccccgagtgccagggtcctggggttttacgctccctggttcttagggcacaggtgtcttagggtctccagataacagggtctcagggaactgatgttaagattccccagattacagggttccgggtcttgaggtttcaaggttgtaacgtctcaaggtgtctgggtcccagagctttgggtgtaccaaatatcatggttaaaggatttgggaggcctctgatgtcggtgtcagggagggcggtgtgtgtgtgcgtgtgtgtgtgtgcgtgtgtgtgtgtgtgtgtgtgtgtgtgtgtgtaagggggtgagggtcttaggatcctggagttggagccctgaatgtcaggatcccgggttttaaggttcccgggaaacggggtcctgggctttagagtcccggatgtgggcttcgggggtgggcgggggctctgtccttacgtgccggcctggcgcagcgaatggatgaggattcggtccgcctcctccatggtggagccgtgtcggagtcgggggctgggtccaggaccgggtccgagaaagtggggagcagctgtagaaaccctgctccgtgctcgcggtccacagagtgtcacgggtcgtgtggggagagttggaaagtgtagttctgtgagcgagcacggcgcatgccggatgtgaggcctggggtgagtgtgcacggaggttgagcttgcaatagctgctgggaactgtagttcttccacctgcagtcca

SEQ ID NO: 1198 - DNA, 21598 bp, Homo sapiens
aggatgggatctcctgctcctgttcctcccgctcctgcccacggcgggctgcgcgggacgtagcgcgctgggtggtcgcaaaaggaagcccagccgtcgtgtgaggcccgcacgtgcaccgccttctcgaaggagcggttcagcacgcgtaccaacccgcgcagcaccggcgggcggcccccaggcacccacaccccggcacccccggggaccgctccgggaggcggcagcagcgcctccagctccaccatgacgcgccccaagcgctccagacggcccggcgcgggcggcagcgaaaatgtggggaccaggtaaaaccccccgccagcggggacggggcacagcggtgagggctcggggcaagcctcctcttcctcctccccttcatccccatcctcgccatcgtcgtcctcgtcggccccgccgccgccgccgccatcttgcccggccgccgccgccatcttgcccgccccgggcccgccccacggccggtagcggcgcaactgcgccagcggcagccccaaggcctcgtcggcgaacagcaccctccgcggggccaccgccgcctcgaccgaggtgcggggctcacccgcggccggcgaggggggcgcggaatgccgcagcgggggctccacaggggccgtacgcgccatatcggcggcggcggcggcaccgacggcaccggcggcgggaccggcgggggcagggcctgaaggggcgggcagccaatgggaaggccagcgcggaggggtacggctcacgggggcataggcggtgagatgaagacaagtattgcagagggccaatgggcagccatgcacggatgacgtacagcgaattgagagccggagaagcacgcagccaatggggatgcccgggagtgggcggtgtagggggcgggatgatcgaggaatcaatggagaggccggaatgggggtggtgcgaaatccatgatgaagaaaacagaagcagacagctaatgcggaagtctgagcgagagaggcatgtgggcggtgggaaaagtggaatggctacaggcgatgagggcagccgggaacgaacgcagaggcccaaaaagtgggagatcccgcgggttgcgtaggcggtggaacggtagctagagagagagaacagccaatggagagccacgcgtgggatgacgacaatggctgcagcgagccaatggggaggcttgtgagcgtgcactgcggcttcgaaggggtggtgccaaggtggagctagccaatacgaaggctaaaaggagaccaagaggcgggtgtgtagggagccgagccaatggaggtggaggctgaaggcgggagcgaggacgagagctggcggatagccaatgagggagccagggtgaaggcgtagagacctcaaaggacagtactagtatgggatgagccaatgccgaggctagatagtgcagcgggacggagggaggacttggaggcaagatggggaaaaaagcagagccgacgggggcagtgtaggtggtgtgaagggaggcatgagtagccaataaggaggctggagaggaggacgctgtgtagacagagtctgaggtattgggtggccggacagcagaaccatagaacgcaggcagccattaggaaaaatgtgcttctcagggatggggttaccctctccctaaccctccgtgactccccattgccccaggaatacccagagcccctgaaggcctagaccacaccttggtgtgtgaactaggaaagtgaaaatgactgtcctgttgcagttagttacttactgggtcctccctgcccaactacaaccttttcttgagcagtgccacaagccaagaatgcccctgattgttagccgcaagcactctccaggacttgatactattgttgaatgaatggccgaataggaaatttaactttctgaaggattcacttttttaaatttcagctcagcaaacactgacctgactgtgtgctaccagaagttgattgggcatatgggtagcttctgactaatggaatcacaatcaaagccctgtccttcttgcccaacctgacactccacaccccacaggggcctcacctcccttctttctgtccccccatctctgcttctactgttccctctcccaagagtgctgttccttctgctgcttccatctagtaaactcctttcgctctccctttggggtctcaccttctgtgggaactcaactgcagcttttgtccgctgaacacatccattcatacattccttctccatcctgggaagatttactgaacacctactgagtgccaggttctgagcatgctgttatctcattagaacctcacagcatcctaggagggaggtgatccttccagcagcccctctccccaggtctccatgttcaggatgtccatgagttagaaatgaatatgttcagctgcaagtaacagaaaaatcataaaataatgggggcttaagcaagacagaactttatttttttctcacctaaaagttcaagctggcaaatagtccagggactccttcctgcccacctggtttgggcattgtctgtcccgatctggctccaagactctcagtcttcaacaaatccttttggctgtctattaaaaatatttaccaaatccatcctcttctcaccacctccactgccagcactatcaccagtcacctagactactgcagtagccagctccttgctggtcccctgcttccacattcaggccctagaccccattgtacactcagcattcaggggcttcctgttaaatcctaacacggtttgtgtttctcctctgcttgcaaccctgtcatgccttcctcctcactcagcgttgaagccaaagtccttaccatggcctacaaggtcctgcgtggtctaacctccgagtcccctttctgacctcacctccagcttctcttcttgctctctccacactaaccacaccagcccccttgtagaccttgaacaaatcaggtacattcccacctcaggacctttgccctggctgtttcctttggagttcctcagatatctagctggctccctccctcatctccttcaagtctttgtcagaggcccctgtctctggggacttttcctgacccgtttaatcttgcctactcacccccaactcccagccctcccagtctccttcccgagaagccctccatgagagaggatatagtccagtatagaggggaggtagcgacctctacccctctctgccctcctgaccccagcccccattctgcaaggatcttggctttcagcagccgtagcatttccctctcacaccctgggcctgcccaaggggccagctcacattctcggccaccatcctcacttcgtttgcctcctatatctctggccactctctttcatggagtgagtgacagtaagggacagatggtctggggaaggtataaggagaatgcagcccacacctctgatcctgagagagaaaactagcccccttttccaggagggggacaggtgctggggcagggaacaatgcctctgctgatagaactggcctggtttataattacgcaggaggtgtagggaacattccgacccaagtctgcagggagcaaggggttattaactatgggaacatcagtgcaagggatcattaaccttaggaccatcactgcaaggggtcattaaccttggggccatcactagaatcagctccccaggactccttcctgacatgcatgctcctcaccccctcccttgctccctcccacatgccgtgacatctgttaaacacctgctgttcacagggtccctgcaggcctccaagcaggggacctcatcccaccttggtgcctcccctggctgtccaacacacccaagccatttttgggtctcagatgtgtcccaccaactcagaagcctcaaccagcgaaagttttgttttgaactaatggtggggagggttgggtgttttttttttttttttaattgttgttggctgatttttttaaggtctttttttttctattctttttttttttttttcttgtcttcacaaagccaggccatcaggcccattctgggcttttccagaagggtgagtctgagttgaggaaagaggccctcctttttacgagggcttagaaggttgggggaggaaagggggcaaaggggtgaaggggtggatcttggccaccagatttgtaccatgtaaataaaaagccctttccaatttctcttccccaggtctgaagccagtcttgtagagggctggagtggttgttggacgactagaaccctgggctttgcagggtgctgggagctggaagtcttcaccatggcctgtcaggagaagcccctgggggctggtctaccatgctgaccagtggttgaatagagtgcctgctgaggtcaagagatgcagccgccaattcctggacaacctaaaagcctcacaagcttcaagtctccaaggactctccaaatcccaggatctccctgccatcacatcctagaatttaaaacctgagaacatcaagttcaggaaagcttggggatttcaaagcccagcaccaaagaaagcgggacccacactcgccagctctgtgatcttgggcaagttgcttgactacttatacctccgtttccctcatctgtataacaggaatacaataatgatgagatggagctcaaggggccatggtgaggattgaacatgatcacttgtgagacatgttcagcactgtatctgacccatggaaaattcaagataaacatcagctactgagatgatggcggatatttggaatcctaaatccttggaaactggggctttttgaagtaaaagaccccaaaggctgagggcctcagaagcatcaggccatgatgttcctgaaacaagagggtcagggtcccaatgggcctctggggttcatcgtgaggatggatgcattaatattggggacctgctagggaccttcccagtgggacagtggctgggtcagggcactcaagccctaaaacgtgatgaggcgagacttttctctctttcctcattcagtaactgtcagtagattctgggagccagggattctccgactcttcaagtccatgaattttaggggatgacagtgggctctccgctttctcctccatgaagtaacttacatgcccctcaccctctgtgggaggggtgttgcagggggtgcagaactcccctcgccgggtagttcaagcaatggggaccatatcaattccatctatagggaaactgaggcctggagtagggcgaggcctctgggaacccagccctattctgtctctttccctggcatttcccatccacacatagagcttcagattctctttctttccccagagaccctcaaatatcctctcactcacagaatggtgtctctgcctgcctcgggttggccctgtgatttattttagttcttttcccttgttttttttttttcaaactctatacacttttgttttaaaaactgtggtttctcatgagccctattatctcattgatacctctcacctctgtggtgaggggaagaaatcatattttcagatgactcgtaaagggcaaagaaaaaaacccaaaatttcaaaatttccgtttaagtctcataatcaagaaaaggagaaacacagagagagagaaaaaaaaaactatgagaacccccccccaccccgtgattatcagcgcacacactcatcgaaaaaaatttggattattagaagagagaggtctgcggcttccacaccgtacagcgtggtttttcttctcggtataaaagcaaagttgtttttgatacgtgacagtttcccacaagccaggctgatccttttctgtcagtccacttcaccaaggtgagtgtccctgctctcccctaccagatgtgggccccattggaggagatggcagggaggtaggcacggcgggggggtcaggggccctctggtacagtgggatgtacccagctaccgtgattccagccaggtaaggtctttaaaaaaataataatagaataaatggcagaagacttaaaggtgaagtacttaatgcatgggcaggggcaaaaataaatgaattcatcaattgatacgtagatggataggatttttaaaatatgtcagctgccagtctttatggatttcagagctttgaacaacttgaaatgctgtccaggtgcaactgaaaatttcaactgcatctctctcatctctttgtctcttagctcttgatgcctctcatccttctctgtctctctgctcaccctgtcttgctcttttacatgtttctctgcctctctttctcccgccatctgtctgtcgctacactcagactctctttccccgcatctctcctggcctctgaccatctcccctatctctgtctcctccatcttgaccacactccatcgatctcctttcctccatctctcccgctctcttttcttgccttcccccacctgccttcccagccagcatccagcctagagctttgtacacagctggcgtttaataatagtaatgtcgccgaggacctttacattttatgagagtgagcatcagttctgttcaccctagtagcaggaggattgcaaggtgccggggcaagctgagcacttaactgaactttgcttgtatcgctttagaggagacccttggggcgggggggcagggagcacttcacaccattgtcaaccgtagtttagctgtgtggacctaccccaggactgcatgtgtgtgaccagagtccatattcaggaagcaaacaggttgttcagggctggggtgagctcgattctgcaggcttagcacagcgtttggcacaaagtaagtgctcacgaagtgttagctattagtatttctgtaaccaaattagaatcatgctatatattggttttgttcctgctttattcaattaacagtagtgtttttgaagcttactaaaaattgtttgaacacatgatctttcatgatggacaagactgtcctcacatcagcatgaactttgattgatttgaccaagtgccgattgttggacattccggttgtttctcgtttttttctataaacatccctgactgcttccttggattcctgaaaagggagttgctggggcaaagggggcgtgcatttttaaagtttatgaccctctctgctaattctccttccaaaaggttgtcctattttatgctccctctacttaagctaaccctaggtgagtattattatgttttaattatttcccaacatgacaggtaagaaaaacacattatcacattgttgaaatttgcatcttgtgattacttttactattcattggccattcatgcttttttttttttttttttttggttgtctggtcatgtccttactcctaatagggtgttcatcttatttttcccttattgatttgccacagctctttatttggaatggttattaacctttcatcagccattacatatatagcaaatattttccccaattcatcatttgctttttttctatttgtttatggtgttttttgtgatgcttatgatggttttatacagtcaaataggttagtctttttttctgtggcttctgtctctggttttgtgcttagaaagtcctttcctacttgaaaatgagataaatgttcacctatgttggcttctagtctcttttatggcttcattttttccatttactatagaggttaagagtgtgggtactggagccagactgtctgggacaaacccagcgtcaccccaagccctatgtgtgatttttagccaggcacttaacctctccatacctccatttcctcatatgtactgcaatggttataatagtaccttcctcaggagtctttgtttagattaaaatttttaaccacagtaaatacttagcacaaggcctgacacacaataaacccaagatcagcattaggtgttaaaacttatatcttgaatggatctgggcattttagggtatatgatgatggtgacatttcaaactgggcagggaggggttgttgggataatggactgactattcactcaataactttatcttctccctaattatctcagacacatttgttaaaccatactccatggtcctccagtttgaaatgccacattcatcacaaattcagttctctccatatgtgggtccatgtccaagctttctattctgttctcttccccagtatctgttcttataccagggccacactgttttgctgattgttgctttgcaatacaattcaatacccagccatgggtgtccctggcaccttgcccttctttattcttgattatttcaggcagcatcagttgaaccagccagagaccagcaaatgttcttatttgaggcaatcctcctctcgcacacatgcactctggctctccatgcatgtgtccatttctctcaatgtctctcactatctcttgttctctcttgctcgctctttgtgtgtgtctctttgtctctatgtatccctatctctcagccagtcccctggatagaggggcaattgtcaacttgaagccctgcagacacctaatgacttaaccagacagcgtagaagggccctggcccttgtctactccacgcctctccgtgctcagtgtagaagggcaaattgaagaccagagatctcagggcctcaccgaaatgcagcggcagagttgaaatccaagcctagatctcaggactctaggtgggaccctggttctggctctctccccaactgaaggcctcagtttacccctcagcacccagaagggggaaggggaacctgggctaccattcccccttctgccttctcacacgttggaccccaacttcccacaggttggacgatccacgatcacagtgtggggcccagcctcacaagagctgggctaggtgaggccccggactccataggtcaggaggcctagttggccagagcgtggtgatgatggaggcatgtcagtcagtcaggctgtgtgtccccagagctggtgctggtccccgaaaaccttgattgtggggcccctctagagagtctgatgatgggctctgtattggcgaaggctgaggcttttccagctccccccatgaggcccagaccaaaggcacaccagcctcaacctcctcctccccctgttgccatctctggcggagtggccatgtatttgggaacgttgttccagagtggacagggagactgaggccctagggaggctggctctgtttccaggcctggtaggcaagaggccctatgaagcagcaagctgcctgactttcagatggttccaaggagtttggacaccagggacactggcctacacatactgagactttgggaccgtagaccccacagtctgtggttttgagattctaggatcctttaaatctaagaaatgctgttctatgattctgaggtcctggtgttatactatttgaagaccccaggggtcccagtatctgtggagcctgcctggcactctcagagcttcaaacctgggtcctctccacaacccaagaagggccaggtcttcagagctaggggcttgtcatagtggccagatggacatcacctaccacatccaccagcacccatgtcaccccacctgggccaagcctgctgcaggacagggcagccagttctcggaacgaaacctgtggggtggggtatctgccctcttctcttcctccgtggtgtcgatgaagcccggcgcatccggccgccatgacgtcaatggcggaaaaatctgggcaagtcgggggctgtgacaacagggcccagatgcagaccccgatatgaaaacataatctgtgtcccagaaacatcccccattcagcttctgagaaacccagtcagaaagggacgtcccaacagacagtgcaggaagccggctgcccagcccggccctctaggtcctctacccccagacagatcatctccatgtccctgtctgagaatgtatctatgctttgctgagtcaggccatcccacatgtgtttggggagaattcttagctctggccaagtgtccaggcagcttcagaagtgaccacaggccagccacatgggccaggccagagtggtggaaaacatccatttgcaccgaaatcggtattagtttgttctggctgctataacaaagtaccacaactgagtggcttcagcaacagaaattgatcatctcacagttctggaggccagagtccaagatcaaggtgttgccagggttggttccttctgggggccataagggagaagctgctccaggcctctcccccagcttctggtggttgctggcaatctttgttatttcttggcttgaaggagcatcaccccatctctggcttcattcattcactcaccttctcatctcaccagtgctctcccaggcccttgttcggagcctccacagacccacactcctgtttctcacgcagtaatgttctaagcccccaggagactaagaacttaatacctggattctcacactcatctccctcagcaccacagctctgacaaccacccccaggaggtgacagcaaagaaaggaaggagcaactgctcccccagaacccttctatactcccccgggctgctctcagcagctgtgtgcccaactcagtgctgtgaggtggaacggggagatggagacacacacacacacacaccagagagtttataaaatgtgcacacggaaacacttcctaaagaaagaagtggagttctcaagtcactatgggactacggaactcggcatctgagcatccccttctgtataatggggttggctgggcagtcccttccagctctggcttcctctcagaccaggattataggatcctgaaaagccagtgcttccctcagggagtggaaggttctggggctcagcagggggcccggagccattgtggagggctttcaaggtgaggacaatagaagagcaggtcttgcgtggcttggacagggaaagaggagaaggagtgggcatttgaggcagggggtgtagcatgagccaggcttgagggccagaaattggggtgaactctgatgggggctgggtagagaagcttctacaggccccagctcaagagaccccatctctcctcctctctgtcacttgccatgctggatccgtgcatgatcacactcctggactcgcctccttgccctgagatccagacccccgtattcagctgccccctcagctcctccactcacatatttaatgccagactcttcatgtctatctacacctgcacttttgcacccaatccaactccccgccatgtcccccatctcaggtaatgtcagctcggtccttccagctgctcaagctaaaacccatgtcactttgactctccctcttgcccactacatccaagctgctagcactgctcctgatccagcttcagattaagtctcagaatctacccacttctcgccttctccactgccaccagcccattctgtgccagcatcatcacttgccaggactgttacaatagcctcctcactagccccactcacagcagccagatgaatcttttgagtccatgcctagtcactggggcaaaataggactccgaggagaaagtccgagaccagctccggcaagatgagcaaacacagcctgtgcagggtgcagggagggctagaggcctgaggcttgaaacagctctcaagtggagggggaaacaaccattgccctcatagaggacacatccacaccagggctgtgctagcgtgggcaggcaagccaggtgctggacctctgcacgtggggcatgtgtgggtatgtacatgtacctgtgttcttggtgtgtgtgtgtgtgtgtgtgtgtgtgtgtgtctagagctggggtgcaactatggggcccctcgggacatgtcccagccaatgcctgctttgaccagaggagtgtccacgtggctcaggtggtcgagtatctcataccgccctagcacacgtgtgactcctttcccctattgtctacgcagcctgcccttggacaaggacccgatgcccaaccccaggcctggcaagccctcggccccttccttggcccttggcccatccccaggagcctcgcccagctggagggctgcacccaaagcctcagacctgctgggggcccggggcccagggggaaccttccagggccgagatcttcgaggcggggcccatgcctcctcttcttccttgaaccccatgccaccatcgcagctgcaggtgaggccctgggcccaggatggggcaggcagggtggggtacctggacctacaggtgccgacctttactgtggcactgggcgggaggggggctggctggggcacaggaagtggtttctgggtcccaggcaagtctgtgacttatgcagatgttgcagggccaagaaaatccccacctgccaggcctcagagattggaggctctccccgacctcccaatccctgtctcaggagaggaggaggccgtattgtagtcccatgagcatagctatgtgtccccatccccatgtgacaagagaagaggactggggccaagtaggtgaggtgacagggctgaggccagctctgcaacttattagctgtttgatctttaaaaagttactcgatctccatgagcctcagtttccatacgtgtaaaagggggatgatcatagcatctaccatgtgggcttgcagtgcagagtatttgaattagacacagaacagtgaggatcaggatggcctctcacccacctgcctttctgcccagctgcccacactgcccctagtcatggtggcaccctccggggcacggctgggccccttgccccacttacaggcactcctccaggacaggccacatttcatgcaccaggtatggacggtgaatgggcagggaggagggagcaggtgggagaactgtggggaggggccccgagtcaggctgaaccacagcccacatgtgccccccagctctcaacggtggatgcccacgcccggacccctgtgctgcaggtgcaccccctggagagcccagccatgatcagcctcacaccacccaccaccgccactggggtcttctccctcaaggcccggcctggcctcccacctggtaacacctcagcccgtaccccatggcttcacagaacccccaagtccccagatccttggctgtgagcagtgtaggctattctgaattgcagtactctgggggtcaaaggtgtcaggtctcagaggcttggaaactccaccctccaaaaaacgtcaggtgcagaaccttaaagatgcagaatgtcaaaatcacaaaaccacagagctttacaaagctagtcaaaatgtcagcacctgcgaatggccgtctttaagcttctctgccagaagcctgggactttggggacagcagagccccctgggagtcagggttttcgaggctcaggagggtgggaagctcaaaatgagaggccttgtgggccaagctccagagcccagcccacagcctccataggtgccctgtccccacccacagggatcaacgtggccagcctggaatgggtgtccagggagccggcactgctctgcaccttcccaaatcccagtgcacccaggaaggacaggtcagtggacagggctgggaaggatcctcgccctcctatcccctcccctgacaccctctgtccccccagcaccctttcggctgtgccccagagctcctacccactgctggcaaatggtgtctgcaagtggcccggatgtgagaaggtcttcgaagagccagaggacttcctcaagtgagtggcccaggcctgtgccagtctaccggccctggcttgtggggagaggtctagggtgcagatctcagctcaggcttcatcccaataagtagtaagatgcaagagctaaactctgagactgtgggttcaaatcccagctccatccctgactggctgtgtgaccttggacaaattacttagcttctctcgacctcagttttctcgtatgtataataagaaacgtttgtgctgttatttacccccattttacagacaaggagactgaggccaaagaggttaagtgtcttgatcaaaatctcccagttcctgagtgacagagctgggatttgaacccatgtagccaggctctagaatctgcactcctgctttgccctgctactcctcatgccaacatgccagccttattccactgttcccaaagttctagctcctctagatggctgctgctgcctcccctcagtccccccatatgtctctctctctctctctctctctctctctctctctctctctctctctctctttctctctctctcacacacacacacacacaaatacacaccacactacacacaacccttagcagcaaccccacatgtcctgtcctccttgcagccaggcctttgcacaggccgtccctccacccagaatgctttgcccactctcacctccctggcccattctcaactcaccacacttccaacattatctccagcactctggccaggctcaagtggtgagttcaggcctgacatgcagtaggtgctgaggggcatgtgttaagggaacgaggggtgtgagagggagactgaggtagagaggggaggggagctggggctcagaggagagaactcccagagggtctgggccctccccattcagagcattgagccagaccaggcctgtcgtggtcacctgcatggaatcttctccctacttaggcactgccaggcggaccatcttctggatgagaagggcagggcacaatgtctcctccagagagagatggtacagtctctggagcagcaggtaatgccagggcggtggagggtaagggatagggatagtgcgcaaaaccttctgtccaccatgtgccagaaaccaagttcacctgggacgagggctggtataaaggaaggaagaggagcgggcactcccagggaagaccgtagcctgggcaaagatgtggcagagaagggccaggctgaggcctcatgtttgtgccatttcacagctggtgctggagaaggagaagctgagtgccatgcaggcccacctggctgggaaaatggcactgaccaaggcttcatctgtggtgagcgaccccaggactggtggtggcagactcagactgctggggggcagggaggaggtctgcacggtgcagggaacctaacctcacattcaggtcctgagagctaggggcccctgtccccagctccaaacatgcccagacctggaaatctgtccccttctacttacaaaccctctgaccccggctgggcgtggtggctcacgcctgtaatcccagcactttgggaggccgaggcgggtggatcacgaggtcaggagttcaagaccagcctcgccaagatggtgaaaccctgtgtctactaaaagtacaaaaaattagccaggcgtggtggcaggtgtctgtagtcccaactacttgggaggctgaggcagagaattgcttgaacctgggaggcggagtttgcagtgagctgagatcataccactgcactccagcctaggcgacagatcaagactccgtctcaagaaaaaaaaaaaaaaaaaaccctctgactctaagatccccaaacactgtgatcctgagttgttaaagcaaatgcaaatagccagacttgccagatgcaggctgtgtgccagcaggaccagctatgtaacctgcagggccccttgttcagatttcaagatggcgaccacagagcattaaacaaagcacagggtgccacataaccacataggtcacacgcccatgaagccagccctggaggccaggcactgtttctgagcgctttgctggtggtaatttatttctcatgatgcgaatgtacagatgaggaatattgaggccaggggggtttaggtgactttcccaaggtcacagttgggtggtaaagagccctattcaaccccagttcatggtcccagcatcagtggccacatacgacatccgcacctgtgctctaataaatacggctcatgctgttttgtgggattccacctcagactggaatttagaagagggcgtccttgctttgaaaaacactgatttaaaaataaagtggagccaggcgcagtggctcatgcctgtaatcccagcactttgggaggctgaagcgggtggatcacatgaggtcaggagttcgagaccagcctggctaacatggtgaaaccccatctctaccaaaaatacaaaaattagctgggcgtagtgacgggcacctgtagtcccagctactcgggaggctgaggcagaagacttgcttgaatctgggaggtgggggttgcagtgagccgagattgcaccactgcactccagcctgggcgacagagcaagactcagtatcaaaaaaaataaaaaacataaaatagaaagtaaaaagtgggaagtttaagcctctgggtcaccagcctctccccctcacccaggcatcatccgacaagggctcctgctgcatcgtagctgctggcagccaaggccctgtcgtcccagcctggtctggcccccgggaggcccctgacagcctgtttgctgtccggaggcacctgtggggtagccatggaaacagcacattcccaggtaagaatggtccttgcactacacggtgcccccaagctcctaatcctgacaggctctgggtggagggtgcaaaggagctccatgctgccccttcccaccaccaccaccactgcagctgccgccactcagcctttgggaaaatgcatccgctcacaaaagcttcctttcgggatgtccgtggcctgaaagccccccatatggtctcgagtgtcgggcccctagccctgactcccttggggattggggccatgcctcacccactctggactccagctactatattcggccatcagaagggagggaccctgctaagtaattccaggagcacctcctttcctcccctgaccaaggaaaatcggggtggattcgcccgagctcacctatccactgctctccaccaggcctggcctgtgggcttagcagggatcagagaccttgactgtcatcctggctctgccatttaacctcttgcatcctttggtgtgcaagttactccgcttcttttcaacctcggggagaactattttggcagaagtggtgcaaagaataaatgatacaacttatgtcaggtgctcagcaaacagtacctgtgcccgtggacacgggtgttgacggtgagatctcaggcctgtagactcaccttgtagggggaggggacagggagctagctaggaggtcctgcatggggcttgattcatccccaccctctgacagagttcctccacaacatggactacttcaagttccacaacatgcgaccccctttcacctacgccacgctcatccgctgggtaagcagggcagctcggccccaaggaggaggaagacaaagatggggtgggggacctgcctcccaaactcctgtctccctctgagtgccctcagagtgggttcctccattcccaagccccagccccaaggatccccaagccgtgcctcaaatgtgacccctcatgctggcttcaccccaaacctgtccgcaaatccaaacctaaaccaccatccaggccagagcatgccaaattctgaccctaaacctacccctttccagatgtccacctcagccccatacctaaccctctcctggacccataaaatagcctaaagctaaccccatctctgcaccttgccctaaacgtaccccagctcttactctaactccttccccagcctttatgccaacccaaccccatctccttccctggccccaacgtaccccagtatgtcaatacacccccaactgggcaccattcccaacctttccttgtaacacccatttgatccttaacttcatcaccccatcccaactccttcatctcagcctccccaatgccttctcagaaccttcatcctagcgccacacctaaccccaaacctgaacctcacccctacatgataccagatattccccgactgtctctgaactgaaaccctgacctagccccatcctgactgatagcctcactgcaatcatcatcgctgactctgtaatcccattcctgaatccaaactgatcaaattccctgaccctcagcctcactccacaccgaaccccacaactaacctcatccttgccctgagcctaaccacctaaccatgtccctgacacgtaagatactcgataattcaaaccatctctggcttctgacctaaagccaagtcatcccatccctcacccctagaccccccacctgagtccaccccagcctgactcttaacccaccccttccctgacccttaagttggcctggccctttaccccttccaaatccttgaccccacttctgacccttcaccttccccaaccctgaaatgtcacctccacagagaaccccaactccaactccatcccagacctttcacctcacttcagccctagccctgaacaagaccccactcccaacctcagtcctgatcccttacctaatcccagaacaaccatacccacacccatctaaccctgcccaacccgacacttcaccccttttctaaccccatctttgaccccatgcttcaccccacatctagtcctgtccctgattacctgcccctacaattccgcccccatgtcagatggctcggggtaggtcatagcccctctaaaccccaagtttggggaatgtgccccttaccccaccccccaacttccaggccatcctggaggctccagagaagcagcggacactcaatgagatctaccactggttcacacgcatgtttgccttcttcagaaaccatcctgccacctggaaggtgagctcctctgaggtggcggtgactgggatggcctcaagtgccatcgcagctcaaagtgggcaggcctgggtctgggctcataggcacattggggaggaacgggatgtgggttgttggtggtggctgctggcctcagaggttgacgcccacctgctccctgtccccggccttccacagaacgccatccgccacaacctgagtctgcacaagtgctttgtgcgggtggagagcgagaagggggctgtgtggaccgtggatgagctggagttccgcaagaaacggagccagaggcccagcaggtgttccaaccctacacctggcccctgacctcaagatcaaggaaaggaggatggacgaacaggggccaaactggtgggaggcagaggtggtgggggcagggatgataggccctggatgtgcccacagggaccaagaagtgaggtttccactgtcttgcctgccagggcccctgttcccccgctggcagccaccccctcccccatcatatcctttgccccaaggctgctcagaggggccccggtcctggccccagcccccacctccgccccagacacaccccccagtcgagccctgcagccaaacagagccttcacaaccagccacacagagcctgcctcagctgctcgcacagattacttcagggctggaaaagtcacacagacacacaaaatgtcacaatcctgtccctcactcaacacaaaccccaaaacacagagagcctgcctcagtacactcaaacaacctcaaagctgcatcatcacacaatcacacacaagcacagccctgacaacccacacaccccaaggcacgcacccacagccagcctcagggcccacaggggcactgtcaacacaggggtgtgcccagaggcctacacagaagcagcgtcagtaccctcaggatctgaggtcccaacacgtgctcgctcacacacacggcctgttagaattcacctgtgtatctcacgcatatgcacacgcacagccccccagtgggtctcttgagtcccgtgcagacacacacagccacacacactgccttgccaaaaataccccgtgtctcccctgccactcacctcactcccattccctgagccctgatccatgcctcagcttagactgcagaggaactactcatttatttgggatccaaggcccccaacccacagtaccgtccccaataaactgcagccgagctccccacatgctggactatcaccccatataagggttgcggtcagtgggcaggggtctgggtccaaggccgcagcaggaggaactggacagcggaggaagtagctagggcatgtgcttggccactgcctccagcaccccaaatccctgcctgaggctggggagagacctctgccggcggctcctcaggcctcccggacccggcctaggaggccagcgttctcctggcggagggctcggtagtcctcccggatcttctccaggttgctgagggtcttcttgcccagctctgtctcgatctgaggcaatgtgaacacatgccccctcagcacacacagcccctttcccagctcctgctcaccagcccccatcacagccactctgggcccctcccaccaactccaacagcctgctctgtcccatggccaggcctcgtgtggtgttccctctacccaaagcatccttcgccatgtggcaggattccccctacatctttaagctgaagcctctgcccatggccctgggaggcagacaggagggcccttggggtggaagctggggctcacagtaggccacttgcctgtcccaggtcacaggcactaaggggcagggctgggtgtccagccatcggctgtgtgtggctccacagcctctgtcagcataacctgaggaactgtccccccggcccgccttggctccccatcctgcccccaggcctcacctgctcctcgaggtctcgaacctcccgcatgatggtgcctgtgtcctcgatggtctggatgagctggctgcagttctggggacaacaggagcagaaggcttgcacccagtcccacccacccccagcagccccaccccaggcacatgtctcccctcacctcgtgcagagcagctagatacttataggccttccgaacagcatcgtccttcttggcatcctgaccagacacagggacctcaaaggtatcagtgggctgcccttgaccatctccatgccctaagaaggccaccctctcccaccaccccactagcttcatcctccatgaaacaaagccagccctgggtatcagtgcacctccagcctcgcacagggcctgggtctggaccccagccagccaattagcagatgcacaaggcagcagcccagcctcaccccactcacccccgcccaacctgccccacaccttgaacacaagctcatcagtcaccgcaaacgtccggtccagcttcccagatagggagttgatttccttctgaagctccttcgtatcagacaagatctggcagacaccatggcagccatgagcccctgcctggggcaggctggctagcagtggagggtcctcatgtgtaccagacagggactgtgtcactgtgtcaggggtgactgggatggattgtgtgtgactattctgtgttagagtgtgactggacagctctgcctgagggtgtgaggtccctgtgcggccacactatgcctgacagcccacatgacccaccctccatggccctggcagtgt

SEQ ID NO: 1199 - DNA, 49 bp, Homo sapiens
acctccatcactctttgactgactgactcaatgcaccctcctccctgtc

SEQ ID NO: 1200 - DNA, 55 bp, Homo sapiens
atgcttgtcctccatcccagacacagccctgcgttggcggaggtggcgctggctg

SEQ ID NO: 1201 - DNA, 38 bp, Homo sapiens
tggacagggagactgaggccctagggaggctggctctg

SEQ ID NO: 1202 - DNA, 25 bp, Homo sapiens
gggacaggcagaaattgtgcaaaaa

SEQ ID NO: 1203 - DNA, 65 bp, Homo sapiens
tcagtctaactactgccctgagaggagagcactattactaccccaaattttagcacaggaaacca

SEQ ID NO: 1204 - DNA, 42 bp, Homo sapiens
gagggccgagccctggtgggagagcaggctcagaatctccag

SEQ ID NO: 1205 - DNA, 58306 bp, Homo sapiens
atgggtgataaaaatagagtttatctagtaactgaccactaaaattttaaaaaagaaaagtagggccagtcgtggtggctcatacctgtaatcctagcactttgggaggctgaggcgggtggatcacctgaggtcaggagttcgagaccagcctggccaacatggtgaaaccctgtctctactaaaaacacaaaaactagtcgggcatggtggtgcatgcctgtaatcctagctactcagaaggctgaggcaggagaatctcttgaacccagggggcagaggttacagtgagctgagaatgtgccacttcactccagcctgggagaaagagcgagactccgtcaagaaagaaaggagagagacagagagagagagagagagagagagagagagagagagagagagaaaaaagtaggctggacgtgctcatgcctgtaatcccaaaactttgggaggctgaggcaggtggattgcttgagctgaggagctcgagaccagcctgggcaacatggcaaaaccctgtctctagtaaaaatataaaaattagctgggcatggtggcatgtgcctgtagtcccagctactcgggaggctgaggtcggaggatcacttgaacccaggaggttgaggctgcagtgagccgtgattgtgccactgcactccagcttgggtgacagaacaagattgcgtctcaattttaaaagacagatgtacaaacttatcaatgtaattcaccacattaacagattaatgggagagggcagggtgggggcataacagtgattgcaagagctccagccagggggaatgacaacgggcgtgtactcagtcttgccctgtgcctggcactgctcagtgactgaagagtcatctcacctcttcctcacttaaccctgtgaggaggaaaagttattaccctgatgacagacgagcaaagggaggcacagagggctgaagccacttgcccactgtgtgaccctgggcaatttagtcccaaactgtgtcgctccagcccctgttcctgtccaccctcctaccctgccttgactataagacctgtctaacatgggctcaggaggagggcagtacaacgttttccccaaagcctgcacctaccctgcttgatgggcattagccccctttatgaatggggaactgaggctggtctaggacgggtgacttgcccaaggtcacaccaccagggctcggggttccaggcttttatgaggcccaccaggccccaaagcccatgtgtcctgggctattgtgggtgtgaatgaggcctgaggggagatggaccccaacatctgaggacaatatgggcaggtcctgtccatcccaagaggccccactctatggctggtgtcaggggcacacgatagaggattccccactagtcgatctccacaaacagaaggcaagacccggagcccagggattgttctgcaggaaggaggccgcctacactgtggttcacaccaggaggctggagtctctgcaagcctgtgtgcaggagtctcggacactcatgctactcccacttcccactgcactctgcttcacttgtgaggtctttgcataagagtgtataaaacctaaatgtatggggggggttgttttgtttttttgagacaagagtctcgctctgttgcccagactagagtgcagtggtgcgatctcggcccactgcaacctccacctcctgggttctagtgattctcccgcctcagcctcccaagtagctgggattacaggcgcccaccaccacgcccggctaatttttatacttttagtacagacggggtttccccacattggccaggctggtctcgaactcctgacctcaagtgatatgcctgcctcagcctcccaaagtgctgggattataggtgtgagccaccgcgcccagcccataagtctgttttaatgatgatgaataaattgcacatccatgaacagtctcccaggtcaagcagtgaaccattattgacatcccagaagtcctctgggccccttctcagccacatccctccctctgccagaggtgaacactatcctgactctggtaatcagcccctcgcttttctttacaatgtcaccatttaggtggtaattcatgagttttgcctgcttgtgaactttgcataaatggatcagtgtggaagcttttttttggctttttgtgattcatctgtatgctttcgtgcagttatggatcttccattctcattatacaatattccattctgcgaatataccacaatttatttagatgcttattggcatctaaggtttgagcccttcatcagttatatgtgattccattatctcctcccaatttttcacttgtgttttcactcctttttgttttgcttttattcatagcaacctactacataaggttttcactctctttatggtgtcttttgatcaatggacattcctaattttaaggtcactgaatgtttcgtaattttcatttatggttgtttctgtgtcgtgatgaagaaaaactttgctaccatgagtatacgaaggtgttttgccttgttttttgttttgttttgtttttgagatggagtctcgatctgtggcccaggctggagtgcagtggtgccatctcggctcactgcaacctctgccccctgagttcaaacgattgtcccgcctcagcctcccaaacagctgggactacaggtggatgcccagctaatttttgtatttttagtagagacggggtttcaccatgttggccaggctggtggtctcaaactcctgatccgcccatctagacctcccaaagtgctgggattacaagagtgagccacagcacccggccctgcctcattgtattcttaaagcgctttggttttgcccttcgcatttaggctttaaacccacttagaattatttttatttgtgttgtaaagtagggatccaagttcatatttttcaatgcgggtaaccaattgttctatttattcaaaatccaatcatttccccactggtctaacacacttccttggtcaccagttctgtgtctacacgagtgtgtctacactgtttccgagatcactgtttttttattggtcgatttgtctactcttgcaaaaatatcgtgccatctgaatataccattacaataagtatcagtgtcctggctagtcttggcacttctacataaatttaagaattaatgtgtcatgatctacacacaggcaaaactctattggaattgtggttggatttgcattgaacctacaaagcagtttcaagagaactgacagctttgcacagtggccagtgaggaagaagggaaatgaggagagtgtggtatcttggaaaccaagtgaagaaagggttgcaaggtagagatgatcaactatgtcaaatgctgccaatatcccaagtaagatgacatctgagacttaaccatggctataacaatgtgaatatcttcagcagttttgctgaaatggttgggcaaaaaagatctgattggggctatttcagaaaggcatcatagaagaactgaagaaagctcgtatagatatttcttccaataggttttgctgtaaagggaagtaaataaatatgtggtgttttattttgttgagcagttttttatttgcatgcaataaatatatatctttctttcaaagcttctgggcttcctgtttttagtagaaatgtgatgtctgtggacagcaactgtgctaccaagtactgcagtacattaactcctctttcctttctgaggccttccttatctcagggactaaggggtctccctgctggtgtcaaaggctgttttttcagtaacctcaaaaccttgtggctgattcacaactgatgtccccacatccacaggagaccacagctaccactgcaaccatgtgactgacaccaaaccctcatgtggctgccactcttcctccctggctcccaccaccaccatccaaatacacacctgtagggtcccacaggcagaatgtggaaaagacaaagaaccatatggattaggaccacgagacgaggagacacacatcttcaaggaaagacatgttgaagcagcagcaggcgaccacgtcccacccccaactccccactgtgatcctcccacagaaagtgaccaccctgcacactcatgcccaaacaggagaacactacaccgcaagacactgtttctcatagagctctattgtggcatataataataggtactctatataaattaaattaaaaataaagctccagcaggttgcacaggttggctgttaataaatatatctctgggtaattgtgccccaagaccagctcacgaccactctccctcatccagagaattatacaaaaataaatacaggctcggggggtaggcggaggacatgcccagttccactctaaaagttcccctcactcacaccatctacccgttccctcatctccactggtgtcaccacagggagccctgtgttgactggagagcttggggatgagaaggcctctctttcagttgagcattctcagaagcaaaggacccaggtcccctcactgcacaggccatgtatcccatcttaagcctctgctgatcccacaagcagagcctatgagaaccaagccagagagaggcacagcgcaagcaccaggagggacacaccgctgttcagagccacagggaccaccactagcccggccaggacccccagagtctgggtcaagggcccccggagctgaggaggcagtgcacacacacattctgcagggactgctagggtgggagacttctttgggggttcaaggcttgggcctgcatccttttcatcctgggagctcacatgaggcctggctacactagagagacagacttcggcccccaagggactgaggagggtgggattttgcccctgcagaaggacgggagaggctggctccttgccagatatgggatccaagctgcctgcccactcactggtgacctctatctgggcttctgtcccggcctcccccagggactcagtcaccccagctatcaccctattcatgtgcaaagagctggtgtccttgcccatccctttctcaggatccccaatgaactgaccctctgtacccagaaccacagggccgtcacatcctgagccctctgcccatgggagccacacatctcccatcgtggctaccacagaacgggccccggagaggatttctggaggcgattccttggggctgtccccttctgggctggagggtgtgacagagagcccctcttcaccctccccttcatcatcagggtcttcggtgtccttgatgagctccacgccacgccccagccgggcatagtgcagcgtgatctcctcagccagggcgctgttcagggcccgctcagggccaggccacttcaagatcaggtcgcggtccgtcagtatgcccaggggatggctgggggacatccctccatctgtggagccctccccaccaccccctgccccacccgcagccacagcagcccgtaggcggctcaggtgagacaggtagagctgctccagctcctggtcgatggtgtcctcaccgagcagctcctctgacccactcacagcctccagcccccctccattctcactcgatactccccatgtggcctctgcctgctgctgactgggctccaggaaaggcccggtggccccctcgctcgcatcgggccctgaggcctggtctctgggggagccacccaggccacagagaggggaggaggggggaatcctgatggccggtgcctggaggacctctgtaaaagccacaggtggactgcttctggggacatcaccttcttctgcggggttgccagtcatcggaacgtcagaaacctggagccatggccggggcaagggggcagagaaaaagcaagggaatgaagcagaggaggggatggaacaagcagagacagtaagaagtgtgacagcccacagccagccccacaggggtttctatataaaaatgccttaaagcgccctctgtcactgtctagactccaaagactgtcatctatggtaaaataacacaattggatgcagtaaaacagggcttcttgcagattataaagctgaggaattcggtgggtgtgaatatttggtgaatgatcatcactaaatactgctggcttaccttcaaaacagagccagttaaaataactaaaagtgtaagtagccaggcacagtggctctcacctgtaatccaagcactttaggaagccaaggcgggcggatcacatgaaactaggagttcgagaccagcctggccaacatggtgaaaccccgtctctaccaaaaatacaaaaattagctgggcgtggtgttgtgcgcctgtaatctcaagaggctgaggcaggagaatcacttgaacccagagggcagagattgcagtgagccgagactgtgccactgcactgcagcctgggcgacagagactttgtctcaaaaaaaaaaaaaataaagagtgtaagtggattgtttgtaacacacaggataaatgcttgaggagatgcatacctcattctccatgatgtgattattacacaatgcatgcctatatcaaaacatctccataaatatatacacttactatgtcccctcaaaaattaaaaattaaaaaaattttaaaaaaaataaaatgcaaaaaaatcccaaaacatagccaggatgtccatatgaacccatgatgtatcatcttctctttaaaaaacaattatttcctagctccatcttttgaaagggcctagaaacaatgaccaatctagtagcagcaagcatgccgagcccccaaatcttggcctttgaatgccactctccactgaaaggaatcagtgctccttaaagaaatagctgtttctggccaggctcagtggctcacgcctgtaatcccagcactttgggaggccaaggcaggtggatcaccaggcaggtcaggagttcaagaccagcctggccaacatggtgaaaccccatctctgcaaaaatacaaaaatcagccgggtgtggtggcatgtgcctgtaatcccagctactcaagaggctgagacaggagaattgcttgaacccagaaggcagaggttgcagtgaaccgagattgtgccactgcactccagcctgggcgacagagaaagactctgactcaaaaaaaaaaaaaaaaaaaagaaagaaaaagaaaaaagaaagaaagagagagagagaggaaagaaaggaaagaaaaataaagtaaaagaaaagaaagaaagagagagacaaaggaaaggaaagaaagaaaggaaaggtaaggaaagaaaggaaaggaaagaaaagaaagaaaaagaaaaagaaaataaagaaaagaaaagcaagaaagaaatggctgtttccaggcttggggcagggagagtacaggatgaacctagcacatattgtcatggaagatgtgagaaaggctcacagaatgatgagggcgtgtcaaaaggacagagtagcccatctcaataagctcctactagccagggatagttcaatttaagcatcaaaaaaagcaaacaaataagtgcaatggattgaaactcattcaaatatgtttagaattcatgagttcataatgacacaaaaccaaaaatccttttattggtcacctttgtagtagtacttctctgaaaactggtaaataaaatggaaaaaattaaatatttacactgctttttctgcacaaactatatctcaaagtagccaaatagctggtgtgggacagtttttctttagagaagaattctagctaataaaggaagtgggaataatagaattaaatagagttaattctagttaatttaataataaaagattaaatacattcgtttaatacaatttgataaattaaataaatttaataagattacattaattaatataattaataaattaataaaaatggagtaagaaatgtatttccacctggatgtaatcagccagacccagactggaaaattctacaggacaagcaaagtttcttcaaccaacaaattgcaaagaaacaaagtgggggagattttaaaaatctaaagagacacatcaatcaaatgcaacatgtcaactttgtttggatcctaaacacttatgagagaagaaaacttgaacactgaccaaatacttgatgatactgaggaattaccgtttattttctaaggtgtgatgatagtattgtggggttaagaattcttaattttctggccagacgtgatggctcacacctgtaatcccagcactttgggaggccaaggcaacggatcccgtctctactaaaaatacaaaaattagctggatgtacttgcttgaacccaggaggcagaggttgcagtaagctgagatcacaccactgcactccagcctaggtgacagagtgagactctgtctcaaaaaaaaaaacaaaaaagagttcttaattttctgagatacaaacagaagtatttatggatgggatgatgtctggatgtcttccaaaataattccagagggaatgggagggaggagacggggtacagataaaataagaatgagcacgtgttgatatttactgaagctgggggatggtgtacgtaggttcattatactattttacttttgtatgtttgaaactttttgtaattaaaaagttcacacacacacacacacacacacacacaccctccaaaatgtctctacctcccctacctaccatcactctcgcctggaccactgcagtggcctccccttcacgagtcgcctgtttccacccttactctgacgtctattttccaagcagcagccagagggagcctgttaaatcctaaatcagattacatccctcctccgtccacaatgctcttgcggctccccctcactcggagtaaaagccaaagtcttcaccatggcctgtgaggcaccacccaatctgtcctcagccacctctctccctcaccccgcaccactctccccctccctcgttctgcccctgctgcgctggcttctacactgtccctcacacacgttagtcatggcctcacctcaggaacttcacactcgcctgggatgttcttcccttagttatccacgtggctcactctctcaccttcctcagatcttcgctcagatctcactaatcactaaagccttcccaggccacccaatctaaagttgcaaccgacccccgcccacaacacacacacacacacacacacacacacacacacacacacacacacacagagtctctcacccactccctattcctttctatttttccttatcactcatcatcacctaaagtaccatatattctattactttatcatgtctcaccctactaacacataagccccctcaaagagcgtttttgcatgtttgtaacagtgcttagcacagaacaagcactccataaatttttgctaaattaacaaatgacatttctacaagcccagctgagtaactgcattctccccctcccccatcaggttctgagttttgtgccctccctccaacccagggaggacccagagctagtgggccccaccacccagcccagcaatagtcacactgtgagcctcctattgggctgtctactccaaggctgcaaggacccacttacctgaagtgtcatctggggccatggacggagaggggtgggggctaccagtggacccactgactcctggacatcaggatgctctgctagagggaagagaaaggcagcattgggcaagacaggcatacaagtaggtatggttttgttaagaaaatctgccatcctagccaactggcagttttgcctctgaagctttctgtgacaatctaaagcagagggtaccccttcattttttttttgagatagggtctcgatgtgtcaccaaggctggggtgcagtggcacaatcatgactcactgcagcatcaacctcccaggctcaaatgatcctcccagctcagcctcccgagtagcagggactacggatgcatgccagcatgcccgtcttttttttttttttttaagagatgaggtctcactatgttgcccaggctcatctcgaactcctggcctcaagcaatcctcctgcctcagcctcccaaagtgctgggattacaggcatgagccactgagcccagcctttttcatttttatagaaagaaaaacagtaggaagaaagacatggtaaatacaagctaaaacttccgaagcttgccaattgcttacccatggcaaaggtgttatcatccatgttcttcgtcttcagttcctcctcggcaggcctgcagggcagaggagagagtacatggatctaataataccctgagaggtcacttctgccacccactggcaccttctgagcctctgtgctagcccaccttcacctgacagctgctgttttctcttctgctgcctttgtttatcccctcatcctaaaagtcctacagcctcattatagaaaattcgcaaaatacaggaaagtctaaagaagcaagaaaaacaatcacacatcagccagagacaactactgttaccattctggaaaatttccttccagatattctacgaaatcatttagattctacagacataatttcacagctagctttgtccatttaacagtaagaaacatcattatacacttttgcaaacatttcaaatggctgcttaatactcatatcataccattcccttcctactgagcagctaagttctttcatttagaggttgcaaagcaaaccagcaaacagcattgggcatagttttatcgacacttgtatcatttctttaggatacattcctggctatggaaagagaaaagatagaagaacccatcttttcggctgggcgtggtggcttacacctgtaattccagcactttgggaggccgaggcagggagaccacttgaggttaggagttcaagaccagcctgggcaacatgatgaaaccctgtctctactaaaaatacaaaaaattagctgggcatggcggtgcacgcccatagtcccaactacttgggaggccgaggcaggagaatcatttgaacctgggaggcggaggttgcagtgagccaagatcgcgccattgcactccagcctaggggacaagagtgaaactcagtctcaaaaaaaaaaaaagggccagacgcggtggctcacatctgtaatcccaacagtttgggaggccgaggcaggtggatcacctgaggtcaggaattcaagaccagcctggccaacatggtgaaactccgtctctactaaaaatataaaaattagctgggcgtggtggtgggcgcctgtaatcccaactacctgggaggctgaggcaggaaaatcgcttgaacccaagaggtagagattgcagtgagccgaaatcacaccactgcactccagcctgggcgacagagtgagagattatctcacaaaaacaaaacaaaacaaaacaaaacaaaaacaccttttctaagaaatggcaggtagacaagactgtgaggcagaggaaggaatgcaaatggagactgggagggaggtcacagaggcctgggtccctatgctaaccctctcgtccccgtatcagcctggcaggtcgcttcacctcctcactcataaaacagagccccggggagtcaggatgtgcactaagcacagggcagtcaagaggaatgaggatggacagccagaaatcagggcctgacacacagctgggattgaatcaactgtagatatttatgggtcttgctcctccttcaccaggccagtcagatccctgagtggcataagccgagtgcatttcaggtgggtcctcccaggggtggcatctcatcatggagaagtcactgttcttattctgaaaatgagtatcaagtgtctacagattaaggtaaatgagggaagcattgactaaaacctgagaggagctggggcgaatgcccacacctttttcttcctaagaggcaatgtgacattcttgatacttctgacaatggttgaaaaatttttttttttgagatggagtctcgttctgtcgccaggctggagtgcaatagcatgatctcggctcactgcaacctctgcctcccaggttcaagtgattctcctgcctcagcctctcaagtatcagggattacaggtacccaccatcacagccagctaatttttgtatttttaatagagacggggtttcgccatgttggccaggctggtctcaaactcctgacctcaggtgatccaccctcctcggcctcccaatgtgctggggttacaggcatgagccaccgtgcccggcctggttgaaactttttgaaaacccataaccaattaccttcacagaaacgagtatcaccatctgacccatacatagtacctactatggcattacacactgttctaagtgcttcacatttttttaaagaagtttttggggttttttggtttttgtttttgtttttttgtattttgtttttagagatggggtcttcctacgttgaccaggctggtcgtgaactcctggactcaagcgatcctcccatctcagcctcccgaagtcctagtactacaggcatgagccacggtgcctgggcaacatgtgttaattcaatcctcacaatcaccctatgagacaggtacttgtaatcctctgaagcaggcagtactattgtctccattttacagaggataaaacagaggctgagtaaatggctcaaggtcatacacttcacatcacaacccaggccttttggctcttacccagtcagctgctgcttcttggatgagggagactggggtcttacccaacccatctccatcctttctagaagtagatagagggaggcatcaatactagacaagatccctccctcctccttcatgcaggcttttctttggacctgcctttgcccacatattcattccccatttccctacctccatgggcctgggacatgcgtggctaggaggccactagacacagaatggctgcaagaactgctttctataaacaccctcggggagaacatttgaaccatatatacggatctagagtctagaagggaccgtctgtctttctctactgtctaggactcacaaatcccaccagaggtacttgaatcagaatactacagggcctagggtgggtgactctgggagcccagctgccacctcccacacatcacagatgagaaagagagattcagagcaaaccagcttggtctcacaccaatcccctccgtggtcctaaaatccaggtctttggacttttgtttcaacacaatttctgccaggctgcactaacttacttctttttgttaccatagtccttcatgacagaaaacatcctcctcctaggatcttctaaaccaagcctcttcaagaaggcccacagacagacagaaagccagccctcccacctgtgcgcagtagcaggcaagccttctcctccatctggcctagtccggacatatattacaaacaggcttctaaaagccactgcagtcatagatgtgagacagaaaaaggagaacactcaggaatcagctagccagcaggtaaaggactccacaattcagttggaggaaggagaaagaaaaacaaatacacaatcaatccttcagcccccagagcaccctttccatggctgaggagggcgagaacatccaaaaagcaggtcacgccattgagccaatcccaagatccacaacatcgacagaagcaaacaagtcgttctccaaagtcagatatgaaagcagaaagcacaagcatgtattgttcacctcctccaccatgggcccctctcattgacacaccaaggcatttgaaaaccttcacatctatccttcaaaacaacacccttcctttttacaaatgcaaaaactaaaactcaaggaactgcatctctacactcactgactacacaaccacgctggtaacaaacactccaggagggctccactttgaagagagtttgaaattgtgggcttaaaaagaaacaagttatctttgaaccgtctttcacagtaaaaactcaagggcagctatgacttcaatcaacatgaggatagtaagagaaatcaagtacaaatgtatactgactcactgatcggtaacagagaagaggggttcttagaaaaatggggagggagaagattaagaacaaaactgtacctgcagtatgcctgctcgttttcaagaaggaaacctgttcttttggcaccagccccacaagtaccacgtggcatcccctcaagggcagtgagccataggggccagggcacacagatctggaaaatcttggacatgcatcatttgggtgctagtgagcactagtcaagctggtgtcgactaaaaggggccatctcaggcctgcacgccagtctcctgggcgtgcaaattcctccggccatcaggaaacacaatggctgccaagctgataggccccgaggagaccagagggtgaggatttggaaagaggtggtgttggccccggcctaggccagccaagaaagccaagaaaggtgattcgccagtcacagagtaagcgagcgggtgagggctgacaagccctgtggagaaaagcaaagcagactttcagagcagtcacagactgccattgccaccaccacccgagtcctctggagcacccccagcattcatgttttcaaagaattttgccagcccaaagtgggtcaggcactgaaacccaaagggaaactcagcagaccccggctcccatgtagtcaacctgaagataacgctgactttccggggggatgagtggcttcagaaacctgccccacgatactcagaattgcagttaccctgagccatctgctttctgaaaagaacagggtttgaaggtggctgtgaaagccaccaagttatgtggggcactgctttgccttccccaacaagtgtgtcagcctcaactctgggacttgcgggtgatccagtggggtagagggagagcagtttctcgtgccatgagcttcttcaacagccatgacttcattctttggccacgacccatagtaagaaatccattctacatcataacccagcacacccacacgtgtaaacagacatataaataactgaaaaatggttgttcttcgagtgaaacaatacttacctttactgcatgtggtgatacactggcatttcttatgctatttcctttttctttttaatgcttgttgaaacccagtaaattgatttcacaactcaataaagggttaggatatgcaattttgaacaattccagctctgccacctatcagctgtgtgacctggggcaagttacttaacctctctgtgcctcagttacctcatctctaaggaggggataataatacctacatcagtgagttgttcagcagatcaaagaaatatttgaaaagtacctataaagcacttaacagtaaccccctccaaatttccattgagggaaactgaagctctgaaaggaaagcaacttgcccagtgttgccctgctggtaaaatgcatcacccagcctggtacagtagctaagagctggagcactagagcaggaccacacaggctcagatcccagctctgccactttcttagcacgtggcctcaggcccatgtccttaaccataatgccctaccaagttttctgtggcataaaagaggatcacgttcacattaattcctcactctacagaaaactaagatgcccctgacttgtcccgttcaactccagttattctggtttcccctgaggctgccaactcagatagcaggttggatccccatcccttcagttataggtgcactgaaagacagtgggccttcctgtgcatcagccccagtgacggatcctggagacaccatggtgagcaaacccaactaggaagcttacaattcagtatggaggaagacattaaaaaaatactcaaactcattatttcaacaaacatttattgagcacctgctaagtgccaggcactgtggcaggcctgcaggaatacagtggtgaatgaaagcagaccatgtccctacccctcacggagcttacagtctagcggggcagagagtcatccagcaaccccctaataaagatataactacaaactgcgatcagtgcctttagaaaaggaaagaatgccctagaataagggtccctggcccaatctacagggtcaggcagggcttacttaaggatgctgaaaagcaaaacgagcaagtggggaggtaggggagtgagaggctgcttgggaacactgtgggagaggtgatgaatgcagtccccgacaaggtgagtttgaggaattatttgggccatcagtcaagtggagatgccgagtttggatacatgaagctaagggaagagccaggagaaagagaagggccagagagttaagaggaaaaccagcagagtgtggtctcaaggcaagggaagacaaagtgttttaagtaggagtggtcaaccacttcaagaggaaaactaaaaaaccacctgcagaatctggcagatgccgggggctaacacttacgggggtgagcaagtgcagaaggcaagtacaggcaactctgcaggggtcagcagtgaaggggagggtgatgaggtgctggccagaagcaggagggagagaacgtggggtcagcggagacagaagggatgctggcacaggcaaaggtgaatagaggatcaagcaaggagggcagcagaaaacctgccaggagagaaaaggtgactgatgatgtcagattctagagcaagtagcagaaactgggacccagagcacaggagggagaagtggcctgagcaagaagggactcctcgtcatctgtaacacaggggagggaaatcagcgtgcagacttgggggccacaagttatagggagttccattcttatggcttctgttttgttttttgaagcaggagagaaagtctgaaggtaaagaacatttgaaagagtcacttcagaggagaaacgagtggatcaaaaaaatatagtagaactgctaggcagggtggccgatgacccctcgactggtggcgatgttcatctgctctgccatgggacattctctaacaaagcttagcacgtgctgggctgatgagtgctatgaaaaagccaggggcccgaggacactggggtggacaggctcccctggggaagtcctcttagaactgagggatcaacactggaggagactgcaaggggtacgggataaatgttcctggtgaaggaaacagcaggggcaaaggccctgcagcagaaaggagcgaggccctttggagtaacagaaagaccatggtgacaggagctcagaaagaccactggtgttaagactatgagccagtggaggccagattggggaatgggatgggagggtgcttgaagaccatggtgaggctctcttggtctttacttttaagaagaataggacacttccaaagggtagtgtcaagtgccaaggaagatcaggagggcttttccccacaccagccctaggactttggactctgggagcctcagtttgctcatccaggaaagagaaatttaaaaccctctacttcacagggaatgttgtcggaattaaaccagaccttgcatgaaaatatagtactcagtgaagtgcctggcgaagagcaggggctcagccaggtctcatacaacaaatcctctgtactccatcccacaagccctgtgacatcttaggaccactctgcatctctttccctgctggaacctagcactgtgcccagcacacagtaggcagtcaataaatgcttgtcgatgaatcatctctaagctttagagttaccaaatgcctggtccagcaacccagggaaagcagccatttgggtttctgaactctatcctgatggctaccacggacttctcccatgccctcacctgatgtggctgtgctcagtgcacagagggcctacagccaacatttcctcaacaggaagccctctgatagggctcccacaggtaagggatataccctgagatcctccgccatttcccaagagggctaggtcacaaagggtggctagtcttcaacagtgctgcaagtcactggcagcacacaggttctaaaacaataatatgttgaaatgtactcaccaagaaagccaccgacctacaaagaaacccttatcgctgatcttgcaatgagcaccaacctcccctttgcaagagctgagatcgaaagataaagaagctatcaaaaagccatctgcccacttaaaataatatcacaagtcatgttaggaaccacagacctggggccagataccaaaacaattgtctgaacaggctgcttcaatttctccttaaaaccgcccatgtatgttaaaagaaaaacaccctctccacccaccttggccctgcaaggttttgatttctctgttctctgcctttcacactctttaaaatgaccaaactcctttacccaaactgtcgcatcttacagacagggttcccatgacagccggcggggatgacagcttgggaaagtgatagaaatgaaggtagctctggggtactggacctgctcagtatcttcatctgggtggtggctacacaagtgcatacatatgtacaaatccactgggctatacacagaatatcagtacactttatgtaggtatacctcgataaagcaaaaaaaaaaaaaaaggtaaaaggaaagcacgacatgctgggaacaccaagagtgaaatccagaatttgccctgaatcatgccacgctttctagaggaccagtttaaaaaaaaaaaaatagaaaaaaataaatgtccctagcatttcttccctggccctgtcactcactagctgagaggctttgagcaagctggctcatctctctgagctacctgtctcccctctactaaatggggataatcatagcacctacacaacacagcatgcacagcaggcctcacggagagaatggatctgatgttcatagcacagaaatcagtaaatgctggccagttatcttttgcagttaccaccatgcttcagttaccttgcccatgtttgctgcattcaatccaaccatgcaaagtgactgtcatttcccttagcagagaaggaaacggaggcaaggccacacagctgatgggcggagccgaatttaggagaggaatccaggaaactgtaggtgtggctccctaaatactgacactagctaacacctgtatgatactactttgagccagactcggttctgagcacctttactcttatcccgtaaagtagatgctataattctgttttacaggtgagggtcctgaggcatggtgtagttaaatgcgttggccaaggtcacaaggccagtaagtggcagcgccaggatttgaacccaggcaatctatgccagaatccacactcttaatgctgtaagaaaaaccatgctgcctgccccctttaaatgaagtctcagattatggtggggctcacaggtgggtgagtgggtacctgcctgcctgctcagttacccaggcacatctgcccaccagaccggagctagacctttctgaaccactcacagcctaaggccttaccagaaccagcagaacccacaaatgtcttactgcagccaggggcttctgaccaagcgtatacatacaaggtccaaaaagcattttcccatttccattcccagtcctcccaggaacagggaaatgtatacattttagggagaatctagtgatcctgggccagacttaggtgaccgcaaaaagaatcaggactagctgctgcccttaaagaactcatagcttgatagaggaaacctagggaaatcttctggggccccctggggtataactgattatttctccctgtccctaaatgatcacaggtggtgtggcaaaaaaacaagggacaaaaacttcaagtccagtacccatctggttctgtctctctgctagagccactgctttcttgtgagagcatgggctcagcccctcgcctccacaggactcaaaagtagattacagcgttaacagtagagtgcacaggcttcaaggtcaggcatgggtgaactggaagagccaggtgccatcactgcctcaaccagtttctccacctctggaatcctggtttcctgctctgtcagaaagagaatctgctctaccccccactggcaaagcccttggtccacactatgtcattgcagttctctccactccagcacactgctgatcattcacaccaagctcatttccaccccaggactttgcacttgctgtttcctctacctagaacacccttgttccatatatgcacataactgttattcatcatccaggacttagtttaaatgaaacctcctcagaaaagtcctccctgttccttttcctacaaactctcccccacctccccaccgtatctgcataactcttctttatcatcattcgggactcacctcctcaaaggccctccctttaacagcatgtctgacacagtcattccctcccaatctatccccttactcccttcagcagctaactttgtccctatttatcctatctgcttgcttgcttgttttttcaaactgtctcccataggagcctgtatgaatccttgagggtagggtagatgtctgtcttgttcagggctttacagtggaactcaataaatggaggaataaaaccccagttaaaacagtgcctagcacgtgtttgacctccatcactctttgactgactgactcaatgcaccctcctccctgtcctggagagcaggcctgaggggttcctgggccggaatgcttgtcctccatcccagacacagccctgcgttggcggaggtggcgctggctgacattacctgcgcctcaccggcttcatgcagctcttcagctgcctggcctcagcctccacgggaccctggcactcgggctgtggctccagctgcggcagctgctgctgctggggcagcccttcggcatcagtgggtgtgggagcgggtgcgatccggagcaggactgtgtagttgcggccgtggttgttggcccagaaagtgccctcaggggtctcatagcgcaccacgaagtcgaggcgcgccccatcgcccgcgccctcagcaaagggcagctggaaggcaaagcggtcggtgcggccgccgtcgtcgggcgaggaggcggatgcctggccgggacccaggccgagccccggatccaggatgggatctcctgctcctgttcctcccgctcctgcccacggcgggctgcgcgggacgtagcgcgctgggtggtcgcaaaaggaagcccagccgtcgtgtgaggcccgcacgtgcaccgccttctcgaaggagcggttcagcacgcgtaccaacccgcgcagcaccggcgggcggcccccaggcacccacaccccggcacccccggggaccgctccgggaggcggcagcagcgcctccagctccaccatgacgcgccccaagcgctccagacggcccggcgcgggcggcagcgaaaatgtggggaccaggtaaaaccccccgccagcggggacggggcacagcggtgagggctcggggcaagcctcctcttcctcctccccttcatccccatcctcgccatcgtcgtcctcgtcggccccgccgccgccgccgccatcttgcccggccgccgccgccatcttgcccgccccgggcccgccccacggccggtagcggcgcaactgcgccagcggcagccccaaggcctcgtcggcgaacagcaccctccgcggggccaccgccgcctcgaccgaggtgcggggctcacccgcggccggcgaggggggcgcggaatgccgcagcgggggctccacaggggccgtacgcgccatatcggcggcggcggcggcaccgacggcaccggcggcgggaccggcgggggcagggcctgaaggggcgggcagccaatgggaaggccagcgcggaggggtacggctcacgggggcataggcggtgagatgaagacaagtattgcagagggccaatgggcagccatgcacggatgacgtacagcgaattgagagccggagaagcacgcagccaatggggatgcccgggagtgggcggtgtagggggcgggatgatcgaggaatcaatggagaggccggaatgggggtggtgcgaaatccatgatgaagaaaacagaagcagacagctaatgcggaagtctgagcgagagaggcatgtgggcggtgggaaaagtggaatggctacaggcgatgagggcagccgggaacgaacgcagaggcccaaaaagtgggagatcccgcgggttgcgtaggcggtggaacggtagctagagagagagaacagccaatggagagccacgcgtgggatgacgacaatggctgcagcgagccaatggggaggcttgtgagcgtgcactgcggcttcgaaggggtggtgccaaggtggagctagccaatacgaaggctaaaaggagaccaagaggcgggtgtgtagggagccgagccaatggaggtggaggctgaaggcgggagcgaggacgagagctggcggatagccaatgagggagccagggtgaaggcgtagagacctcaaaggacagtactagtatgggatgagccaatgccgaggctagatagtgcagcgggacggagggaggacttggaggcaagatggggaaaaaagcagagccgacgggggcagtgtaggtggtgtgaagggaggcatgagtagccaataaggaggctggagaggaggacgctgtgtagacagagtctgaggtattgggtggccggacagcagaaccatagaacgcaggcagccattaggaaaaatgtgcttctcagggatggggttaccctctccctaaccctccgtgactccccattgccccaggaatacccagagcccctgaaggcctagaccacaccttggtgtgtgaactaggaaagtgaaaatgactgtcctgttgcagttagttacttactgggtcctccctgcccaactacaaccttttcttgagcagtgccacaagccaagaatgcccctgattgttagccgcaagcactctccaggacttgatactattgttgaatgaatggccgaataggaaatttaactttctgaaggattcacttttttaaatttcagctcagcaaacactgacctgactgtgtgctaccagaagttgattgggcatatgggtagcttctgactaatggaatcacaatcaaagccctgtccttcttgcccaacctgacactccacaccccacaggggcctcacctcccttctttctgtccccccatctctgcttctactgttccctctcccaagagtgctgttccttctgctgcttccatctagtaaactcctttcgctctccctttggggtctcaccttctgtgggaactcaactgcagcttttgtccgctgaacacatccattcatacattccttctccatcctgggaagatttactgaacacctactgagtgccaggttctgagcatgctgttatctcattagaacctcacagcatcctaggagggaggtgatccttccagcagcccctctccccaggtctccatgttcaggatgtccatgagttagaaatgaatatgttcagctgcaagtaacagaaaaatcataaaataatgggggcttaagcaagacagaactttatttttttctcacctaaaagttcaagctggcaaatagtccagggactccttcctgcccacctggtttgggcattgtctgtcccgatctggctccaagactctcagtcttcaacaaatccttttggctgtctattaaaaatatttaccaaatccatcctcttctcaccacctccactgccagcactatcaccagtcacctagactactgcagtagccagctccttgctggtcccctgcttccacattcaggccctagaccccattgtacactcagcattcaggggcttcctgttaaatcctaacacggtttgtgtttctcctctgcttgcaaccctgtcatgccttcctcctcactcagcgttgaagccaaagtccttaccatggcctacaaggtcctgcgtggtctaacctccgagtcccctttctgacctcacctccagcttctcttcttgctctctccacactaaccacaccagcccccttgtagaccttgaacaaatcaggtacattcccacctcaggacctttgccctggctgtttcctttggagttcctcagatatctagctggctccctccctcatctccttcaagtctttgtcagaggcccctgtctctggggacttttcctgacccgtttaatcttgcctactcacccccaactcccagccctcccagtctccttcccgagaagccctccatgagagaggatatagtccagtatagaggggaggtagcgacctctacccctctctgccctcctgaccccagcccccattctgcaaggatcttggctttcagcagccgtagcatttccctctcacaccctgggcctgcccaaggggccagctcacattctcggccaccatcctcacttcgtttgcctcctatatctctggccactctctttcatggagtgagtgacagtaagggacagatggtctggggaaggtataaggagaatgcagcccacacctctgatcctgagagagaaaactagcccccttttccaggagggggacaggtgctggggcagggaacaatgcctctgctgatagaactggcctggtttataattacgcaggaggtgtagggaacattccgacccaagtctgcagggagcaaggggttattaactatgggaacatcagtgcaagggatcattaaccttaggaccatcactgcaaggggtcattaaccttggggccatcactagaatcagctccccaggactccttcctgacatgcatgctcctcaccccctcccttgctccctcccacatgccgtgacatctgttaaacacctgctgttcacagggtccctgcaggcctccaagcaggggacctcatcccaccttggtgcctcccctggctgtccaacacacccaagccatttttgggtctcagatgtgtcccaccaactcagaagcctcaaccagcgaaagttttgttttgaactaatggtggggagggttgggtgttttttttttttttttaattgttgttggctgatttttttaaggtctttttttttctattctttttttttttttttcttgtcttcacaaagccaggccatcaggcccattctgggcttttccagaagggtgagtctgagttgaggaaagaggccctcctttttacgagggcttagaaggttgggggaggaaagggggcaaaggggtgaaggggtggatcttggccaccagatttgtaccatgtaaataaaaagccctttccaatttctcttccccaggtctgaagccagtcttgtagagggctggagtggttgttggacgactagaaccctgggctttgcagggtgctgggagctggaagtcttcaccatggcctgtcaggagaagcccctgggggctggtctaccatgctgaccagtggttgaatagagtgcctgctgaggtcaagagatgcagccgccaattcctggacaacctaaaagcctcacaagcttcaagtctccaaggactctccaaatcccaggatctccctgccatcacatcctagaatttaaaacctgagaacatcaagttcaggaaagcttggggatttcaaagcccagcaccaaagaaagcgggacccacactcgccagctctgtgatcttgggcaagttgcttgactacttatacctccgtttccctcatctgtataacaggaatacaataatgatgagatggagctcaaggggccatggtgaggattgaacatgatcacttgtgagacatgttcagcactgtatctgacccatggaaaattcaagataaacatcagctactgagatgatggcggatatttggaatcctaaatccttggaaactggggctttttgaagtaaaagaccccaaaggctgagggcctcagaagcatcaggccatgatgttcctgaaacaagagggtcagggtcccaatgggcctctggggttcatcgtgaggatggatgcattaatattggggacctgctagggaccttcccagtgggacagtggctgggtcagggcactcaagccctaaaacgtgatgaggcgagacttttctctctttcctcattcagtaactgtcagtagattctgggagccagggattctccgactcttcaagtccatgaattttaggggatgacagtgggctctccgctttctcctccatgaagtaacttacatgcccctcaccctctgtgggaggggtgttgcagggggtgcagaactcccctcgccgggtagttcaagcaatggggaccatatcaattccatctatagggaaactgaggcctggagtagggcgaggcctctgggaacccagccctattctgtctctttccctggcatttcccatccacacatagagcttcagattctctttctttccccagagaccctcaaatatcctctcactcacagaatggtgtctctgcctgcctcgggttggccctgtgatttattttagttcttttcccttgttttttttttttcaaactctatacacttttgttttaaaaactgtggtttctcatgagccctattatctcattgatacctctcacctctgtggtgaggggaagaaatcatattttcagatgactcgtaaagggcaaagaaaaaaacccaaaatttcaaaatttccgtttaagtctcataatcaagaaaaggagaaacacagagagagagaaaaaaaaaactatgagaacccccccccaccccgtgattatcagcgcacacactcatcgaaaaaaatttggattattagaagagagaggtctgcggcttccacaccgtacagcgtggtttttcttctcggtataaaagcaaagttgtttttgatacgtgacagtttcccacaagccaggctgatccttttctgtcagtccacttcaccaaggtgagtgtccctgctctcccctaccagatgtgggccccattggaggagatggcagggaggtaggcacggcgggggggtcaggggccctctggtacagtgggatgtacccagctaccgtgattccagccaggtaaggtctttaaaaaaataataatagaataaatggcagaagacttaaaggtgaagtacttaatgcatgggcaggggcaaaaataaatgaattcatcaattgatacgtagatggataggatttttaaaatatgtcagctgccagtctttatggatttcagagctttgaacaacttgaaatgctgtccaggtgcaactgaaaatttcaactgcatctctctcatctctttgtctcttagctcttgatgcctctcatccttctctgtctctctgctcaccctgtcttgctcttttacatgtttctctgcctctctttctcccgccatctgtctgtcgctacactcagactctctttccccgcatctctcctggcctctgaccatctcccctatctctgtctcctccatcttgaccacactccatcgatctcctttcctccatctctcccgctctcttttcttgccttcccccacctgccttcccagccagcatccagcctagagctttgtacacagctggcgtttaataatagtaatgtcgccgaggacctttacattttatgagagtgagcatcagttctgttcaccctagtagcaggaggattgcaaggtgccggggcaagctgagcacttaactgaactttgcttgtatcgctttagaggagacccttggggcgggggggcagggagcacttcacaccattgtcaaccgtagtttagctgtgtggacctaccccaggactgcatgtgtgtgaccagagtccatattcaggaagcaaacaggttgttcagggctggggtgagctcgattctgcaggcttagcacagcgtttggcacaaagtaagtgctcacgaagtgttagctattagtatttctgtaaccaaattagaatcatgctatatattggttttgttcctgctttattcaattaacagtagtgtttttgaagcttactaaaaattgtttgaacacatgatctttcatgatggacaagactgtcctcacatcagcatgaactttgattgatttgaccaagtgccgattgttggacattccggttgtttctcgtttttttctataaacatccctgactgcttccttggattcctgaaaagggagttgctggggcaaagggggcgtgcatttttaaagtttatgaccctctctgctaattctccttccaaaaggttgtcctattttatgctccctctacttaagctaaccctaggtgagtattattatgttttaattatttcccaacatgacaggtaagaaaaacacattatcacattgttgaaatttgcatcttgtgattacttttactattcattggccattcatgcttttttttttttttttttttggttgtctggtcatgtccttactcctaatagggtgttcatcttatttttcccttattgatttgccacagctctttatttggaatggttattaacctttcatcagccattacatatatagcaaatattttccccaattcatcatttgctttttttctatttgtttatggtgttttttgtgatgcttatgatggttttatacagtcaaataggttagtctttttttctgtggcttctgtctctggttttgtgcttagaaagtcctttcctacttgaaaatgagataaatgttcacctatgttggcttctagtctcttttatggcttcattttttccatttactatagaggttaagagtgtgggtactggagccagactgtctgggacaaacccagcgtcaccccaagccctatgtgtgatttttagccaggcacttaacctctccatacctccatttcctcatatgtactgcaatggttataatagtaccttcctcaggagtctttgtttagattaaaatttttaaccacagtaaatacttagcacaaggcctgacacacaataaacccaagatcagcattaggtgttaaaacttatatcttgaatggatctgggcattttagggtatatgatgatggtgacatttcaaactgggcagggaggggttgttgggataatggactgactattcactcaataactttatcttctccctaattatctcagacacatttgttaaaccatactccatggtcctccagtttgaaatgccacattcatcacaaattcagttctctccatatgtgggtccatgtccaagctttctattctgttctcttccccagtatctgttcttataccagggccacactgttttgctgattgttgctttgcaatacaattcaatacccagccatgggtgtccctggcaccttgcccttctttattcttgattatttcaggcagcatcagttgaaccagccagagaccagcaaatgttcttatttgaggcaatcctcctctcgcacacatgcactctggctctccatgcatgtgtccatttctctcaatgtctctcactatctcttgttctctcttgctcgctctttgtgtgtgtctctttgtctctatgtatccctatctctcagccagtcccctggatagaggggcaattgtcaacttgaagccctgcagacacctaatgacttaaccagacagcgtagaagggccctggcccttgtctactccacgcctctccgtgctcagtgtagaagggcaaattgaagaccagagatctcagggcctcaccgaaatgcagcggcagagttgaaatccaagcctagatctcaggactctaggtgggaccctggttctggctctctccccaactgaaggcctcagtttacccctcagcacccagaagggggaaggggaacctgggctaccattcccccttctgccttctcacacgttggaccccaacttcccacaggttggacgatccacgatcacagtgtggggcccagcctcacaagagctgggctaggtgaggccccggactccataggtcaggaggcctagttggccagagcgtggtgatgatggaggcatgtcagtcagtcaggctgtgtgtccccagagctggtgctggtccccgaaaaccttgattgtggggcccctctagagagtctgatgatgggctctgtattggcgaaggctgaggcttttccagctccccccatgaggcccagaccaaaggcacaccagcctcaacctcctcctccccctgttgccatctctggcggagtggccatgtatttgggaacgttgttccagagtggacagggagactgaggccctagggaggctggctctgtttccaggcctggtaggcaagaggccctatgaagcagcaagctgcctgactttcagatggttccaaggagtttggacaccagggacactggcctacacatactgagactttgggaccgtagaccccacagtctgtggttttgagattctaggatcctttaaatctaagaaatgctgttctatgattctgaggtcctggtgttatactatttgaagaccccaggggtcccagtatctgtggagcctgcctggcactctcagagcttcaaacctgggtcctctccacaacccaagaagggccaggtcttcagagctaggggcttgtcatagtggccagatggacatcacctaccacatccaccagcacccatgtcaccccacctgggccaagcctgctgcaggacagggcagccagttctcggaacgaaacctgtggggtggggtatctgccctcttctcttcctccgtggtgtcgatgaagcccggcgcatccggccgccatgacgtcaatggcggaaaaatctgggcaagtcgggggctgtgacaacagggcccagatgcagaccccgatatgaaaacataatctgtgtcccagaaacatcccccattcagcttctgagaaacccagtcagaaagggacgtcccaacagacagtgcaggaagccggctgcccagcccggccctctaggtcctctacccccagacagatcatctccatgtccctgtctgagaatgtatctatgctttgctgagtcaggccatcccacatgtgtttggggagaattcttagctctggccaagtgtccaggcagcttcagaagtgaccacaggccagccacatgggccaggccagagtggtggaaaacatccatttgcaccgaaatcggtattagtttgttctggctgctataacaaagtaccacaactgagtggcttcagcaacagaaattgatcatctcacagttctggaggccagagtccaagatcaaggtgttgccagggttggttccttctgggggccataagggagaagctgctccaggcctctcccccagcttctggtggttgctggcaatctttgttatttcttggcttgaaggagcatcaccccatctctggcttcattcattcactcaccttctcatctcaccagtgctctcccaggcccttgttcggagcctccacagacccacactcctgtttctcacgcagtaatgttctaagcccccaggagactaagaacttaatacctggattctcacactcatctccctcagcaccacagctctgacaaccacccccaggaggtgacagcaaagaaaggaaggagcaactgctcccccagaacccttctatactcccccgggctgctctcagcagctgtgtgcccaactcagtgctgtgaggtggaacggggagatggagacacacacacacacacaccagagagtttataaaatgtgcacacggaaacacttcctaaagaaagaagtggagttctcaagtcactatgggactacggaactcggcatctgagcatccccttctgtataatggggttggctgggcagtcccttccagctctggcttcctctcagaccaggattataggatcctgaaaagccagtgcttccctcagggagtggaaggttctggggctcagcagggggcccggagccattgtggagggctttcaaggtgaggacaatagaagagcaggtcttgcgtggcttggacagggaaagaggagaaggagtgggcatttgaggcagggggtgtagcatgagccaggcttgagggccagaaattggggtgaactctgatgggggctgggtagagaagcttctacaggccccagctcaagagaccccatctctcctcctctctgtcacttgccatgctggatccgtgcatgatcacactcctggactcgcctccttgccctgagatccagacccccgtattcagctgccccctcagctcctccactcacatatttaatgccagactcttcatgtctatctacacctgcacttttgcacccaatccaactccccgccatgtcccccatctcaggtaatgtcagctcggtccttccagctgctcaagctaaaacccatgtcactttgactctccctcttgcccactacatccaagctgctagcactgctcctgatccagcttcagattaagtctcagaatctacccacttctcgccttctccactgccaccagcccattctgtgccagcatcatcacttgccaggactgttacaatagcctcctcactagccccactcacagcagccagatgaatcttttgagtccatgcctagtcactggggcaaaataggactccgaggagaaagtccgagaccagctccggcaagatgagcaaacacagcctgtgcagggtgcagggagggctagaggcctgaggcttgaaacagctctcaagtggagggggaaacaaccattgccctcatagaggacacatccacaccagggctgtgctagcgtgggcaggcaagccaggtgctggacctctgcacgtggggcatgtgtgggtatgtacatgtacctgtgttcttggtgtgtgtgtgtgtgtgtgtgtgtgtgtgtgtctagagctggggtgcaactatggggcccctcgggacatgtcccagccaatgcctgctttgaccagaggagtgtccacgtggctcaggtggtcgagtatctcataccgccctagcacacgtgtgactcctttcccctattgtctacgcagcctgcccttggacaaggacccgatgcccaaccccaggcctggcaagccctcggccccttccttggcccttggcccatccccaggagcctcgcccagctggagggctgcacccaaagcctcagacctgctgggggcccggggcccagggggaaccttccagggccgagatcttcgaggcggggcccatgcctcctcttcttccttgaaccccatgccaccatcgcagctgcaggtgaggccctgggcccaggatggggcaggcagggtggggtacctggacctacaggtgccgacctttactgtggcactgggcgggaggggggctggctggggcacaggaagtggtttctgggtcccaggcaagtctgtgacttatgcagatgttgcagggccaagaaaatccccacctgccaggcctcagagattggaggctctccccgacctcccaatccctgtctcaggagaggaggaggccgtattgtagtcccatgagcatagctatgtgtccccatccccatgtgacaagagaagaggactggggccaagtaggtgaggtgacagggctgaggccagctctgcaacttattagctgtttgatctttaaaaagttactcgatctccatgagcctcagtttccatacgtgtaaaagggggatgatcatagcatctaccatgtgggcttgcagtgcagagtatttgaattagacacagaacagtgaggatcaggatggcctctcacccacctgcctttctgcccagctgcccacactgcccctagtcatggtggcaccctccggggcacggctgggccccttgccccacttacaggcactcctccaggacaggccacatttcatgcaccaggtatggacggtgaatgggcagggaggagggagcaggtgggagaactgtggggaggggccccgagtcaggctgaaccacagcccacatgtgccccccagctctcaacggtggatgcccacgcccggacccctgtgctgcaggtgcaccccctggagagcccagccatgatcagcctcacaccacccaccaccgccactggggtcttctccctcaaggcccggcctggcctcccacctggtaacacctcagcccgtaccccatggcttcacagaacccccaagtccccagatccttggctgtgagcagtgtaggctattctgaattgcagtactctgggggtcaaaggtgtcaggtctcagaggcttggaaactccaccctccaaaaaacgtcaggtgcagaaccttaaagatgcagaatgtcaaaatcacaaaaccacagagctttacaaagctagtcaaaatgtcagcacctgcgaatggccgtctttaagcttctctgccagaagcctgggactttggggacagcagagccccctgggagtcagggttttcgaggctcaggagggtgggaagctcaaaatgagaggccttgtgggccaagctccagagcccagcccacagcctccataggtgccctgtccccacccacagggatcaacgtggccagcctggaatgggtgtccagggagccggcactgctctgcaccttcccaaatcccagtgcacccaggaaggacaggtcagtggacagggctgggaaggatcctcgccctcctatcccctcccctgacaccctctgtccccccagcaccctttcggctgtgccccagagctcctacccactgctggcaaatggtgtctgcaagtggcccggatgtgagaaggtcttcgaagagccagaggacttcctcaagtgagtggcccaggcctgtgccagtctaccggccctggcttgtggggagaggtctagggtgcagatctcagctcaggcttcatcccaataagtagtaagatgcaagagctaaactctgagactgtgggttcaaatcccagctccatccctgactggctgtgtgaccttggacaaattacttagcttctctcgacctcagttttctcgtatgtataataagaaacgtttgtgctgttatttacccccattttacagacaaggagactgaggccaaagaggttaagtgtcttgatcaaaatctcccagttcctgagtgacagagctgggatttgaacccatgtagccaggctctagaatctgcactcctgctttgccctgctactcctcatgccaacatgccagccttattccactgttcccaaagttctagctcctctagatggctgctgctgcctcccctcagtccccccatatgtctctctctctctctctctctctctctctctctctctctctctctctctctttctctctctctcacacacacacacacacaaatacacaccacactacacacaacccttagcagcaaccccacatgtcctgtcctccttgcagccaggcctttgcacaggccgtccctccacccagaatgctttgcccactctcacctccctggcccattctcaactcaccacacttccaacattatctccagcactctggccaggctcaagtggtgagttcaggcctgacatgcagtaggtgctgaggggcatgtgttaagggaacgaggggtgtgagagggagactgaggtagagaggggaggggagctggggctcagaggagagaactcccagagggtctgggccctccccattcagagcattgagccagaccaggcctgtcgtggtcacctgcatggaatcttctccctacttaggcactgccaggcggaccatcttctggatgagaagggcagggcacaatgtctcctccagagagagatggtacagtctctggagcagcaggtaatgccagggcggtggagggtaagggatagggatagtgcgcaaaaccttctgtccaccatgtgccagaaaccaagttcacctgggacgagggctggtataaaggaaggaagaggagcgggcactcccagggaagaccgtagcctgggcaaagatgtggcagagaagggccaggctgaggcctcatgtttgtgccatttcacagctggtgctggagaaggagaagctgagtgccatgcaggcccacctggctgggaaaatggcactgaccaaggcttcatctgtggtgagcgaccccaggactggtggtggcagactcagactgctggggggcagggaggaggtctgcacggtgcagggaacctaacctcacattcaggtcctgagagctaggggcccctgtccccagctccaaacatgcccagacctggaaatctgtccccttctacttacaaaccctctgaccccggctgggcgtggtggctcacgcctgtaatcccagcactttgggaggccgaggcgggtggatcacgaggtcaggagttcaagaccagcctcgccaagatggtgaaaccctgtgtctactaaaagtacaaaaaattagccaggcgtggtggcaggtgtctgtagtcccaactacttgggaggctgaggcagagaattgcttgaacctgggaggcggagtttgcagtgagctgagatcataccactgcactccagcctaggcgacagatcaagactccgtctcaagaaaaaaaaaaaaaaaaaaccctctgactctaagatccccaaacactgtgatcctgagttgttaaagcaaatgcaaatagccagacttgccagatgcaggctgtgtgccagcaggaccagctatgtaacctgcagggccccttgttcagatttcaagatggcgaccacagagcattaaacaaagcacagggtgccacataaccacataggtcacacgcccatgaagccagccctggaggccaggcactgtttctgagcgctttgctggtggtaatttatttctcatgatgcgaatgtacagatgaggaatattgaggccaggggggtttaggtgactttcccaaggtcacagttgggtggtaaagagccctattcaaccccagttcatggtcccagcatcagtggccacatacgacatccgcacctgtgctctaataaatacggctcatgctgttttgtgggattccacctcagactggaatttagaagagggcgtccttgctttgaaaaacactgatttaaaaataaagtggagccaggcgcagtggctcatgcctgtaatcccagcactttgggaggctgaagcgggtggatcacatgaggtcaggagttcgagaccagcctggctaacatggtgaaaccccatctctaccaaaaatacaaaaattagctgggcgtagtgacgggcacctgtagtcccagctactcgggaggctgaggcagaagacttgcttgaatctgggaggtgggggttgcagtgagccgagattgcaccactgcactccagcctgggcgacagagcaagactcagtatcaaaaaaaataaaaaacataaaatagaaagtaaaaagtgggaagtttaagcctctgggtcaccagcctctccccctcacccaggcatcatccgacaagggctcctgctgcatcgtagctgctggcagccaaggccctgtcgtcccagcctggtctggcccccgggaggcccctgacagcctgtttgctgtccggaggcacctgtggggtagccatggaaacagcacattcccaggtaagaatggtccttgcactacacggtgcccccaagctcctaatcctgacaggctctgggtggagggtgcaaaggagctccatgctgccccttcccaccaccaccaccactgcagctgccgccactcagcctttgggaaaatgcatccgctcacaaaagcttcctttcgggatgtccgtggcctgaaagccccccatatggtctcgagtgtcgggcccctagccctgactcccttggggattggggccatgcctcacccactctggactccagctactatattcggccatcagaagggagggaccctgctaagtaattccaggagcacctcctttcctcccctgaccaaggaaaatcggggtggattcgcccgagctcacctatccactgctctccaccaggcctggcctgtgggcttagcagggatcagagaccttgactgtcatcctggctctgccatttaacctcttgcatcctttggtgtgcaagttactccgcttcttttcaacctcggggagaactattttggcagaagtggtgcaaagaataaatgatacaacttatgtcaggtgctcagcaaacagtacctgtgcccgtggacacgggtgttgacggtgagatctcaggcctgtagactcaccttgtagggggaggggacagggagctagctaggaggtcctgcatggggcttgattcatccccaccctctgacagagttcctccacaacatggactacttcaagttccacaacatgcgaccccctttcacctacgccacgctcatccgctgggtaagcagggcagctcggccccaaggaggaggaagacaaagatggggtgggggacctgcctcccaaactcctgtctccctctgagtgccctcagagtgggttcctccattcccaagccccagccccaaggatccccaagccgtgcctcaaatgtgacccctcatgctggcttcaccccaaacctgtccgcaaatccaaacctaaaccaccatccaggccagagcatgccaaattctgaccctaaacctacccctttccagatgtccacctcagccccatacctaaccctctcctggacccataaaatagcctaaagctaaccccatctctgcaccttgccctaaacgtaccccagctcttactctaactccttccccagcctttatgccaacccaaccccatctccttccctggccccaacgtaccccagtatgtcaatacacccccaactgggcaccattcccaacctttccttgtaacacccatttgatccttaacttcatcaccccatcccaactccttcatctcagcctccccaatgccttctcagaaccttcatcctagcgccacacctaaccccaaacctgaacctcacccctacatgataccagatattccccgactgtctctgaactgaaaccctgacctagccccatcctgactgatagcctcactgcaatcatcatcgctgactctgtaatcccattcctgaatccaaactgatcaaattccctgaccctcagcctcactccacaccgaaccccacaactaacctcatccttgccctgagcctaaccacctaaccatgtccctgacacgtaagatactcgataattcaaaccatctctggcttctgacctaaagccaagtcatcccatccctcacccctagaccccccacctgagtccaccccagcctgactcttaacccaccccttccctgacccttaagttggcctggccctttaccccttccaaatccttgaccccacttctgacccttcaccttccccaaccctgaaatgtcacctccacagagaaccccaactccaactccatcccagacctttcacctcacttcagccctagccctgaacaagaccccactcccaacctcagtcctgatcccttacctaatcccagaacaaccatacccacacccatctaaccctgcccaacccgacacttcaccccttttctaaccccatctttgaccccatgcttcaccccacatctagtcctgtccctgattacctgcccctacaattccgcccccatgtcagatggctcggggtaggtcatagcccctctaaaccccaagtttggggaatgtgccccttaccccaccccccaacttccaggccatcctggaggctccagagaagcagcggacactcaatgagatctaccactggttcacacgcatgtttgccttcttcagaaaccatcctgccacctggaaggtgagctcctctgaggtggcggtgactgggatggcctcaagtgccatcgcagctcaaagtgggcaggcctgggtctgggctcataggcacattggggaggaacgggatgtgggttgttggtggtggctgctggcctcagaggttgacgcccacctgctccctgtccccggccttccacagaacgccatccgccacaacctgagtctgcacaagtgctttgtgcgggtggagagcgagaagggggctgtgtggaccgtggatgagctggagttccgcaagaaacggagccagaggcccagcaggtgttccaaccctacacctggcccctgacctcaagatcaaggaaaggaggatggacgaacaggggccaaactggtgggaggcagaggtggtgggggcagggatgataggccctggatgtgcccacagggaccaagaagtgaggtttccactgtcttgcctgccagggcccctgttcccccgctggcagccaccccctcccccatcatatcctttgccccaaggctgctcagaggggccccggtcctggccccagcccccacctccgccccagacacaccccccagtcgagccctgcagccaaacagagccttcacaaccagccacacagagcctgcctcagctgctcgcacagattacttcagggctggaaaagtcacacagacacacaaaatgtcacaatcctgtccctcactcaacacaaaccccaaaacacagagagcctgcctcagtacactcaaacaacctcaaagctgcatcatcacacaatcacacacaagcacagccctgacaacccacacaccccaaggcacgcacccacagccagcctcagggcccacaggggcactgtcaacacaggggtgtgcccagaggcctacacagaagcagcgtcagtaccctcaggatctgaggtcccaacacgtgctcgctcacacacacggcctgttagaattcacctgtgtatctcacgcatatgcacacgcacagccccccagtgggtctcttgagtcccgtgcagacacacacagccacacacactgccttgccaaaaataccccgtgtctcccctgccactcacctcactcccattccctgagccctgatccatgcctcagcttagactgcagaggaactactcatttatttgggatccaaggcccccaacccacagtaccgtccccaataaactgcagccgagctccccacatgctggactatcaccccatataagggttgcggtcagtgggcaggggtctgggtccaaggccgcagcaggaggaactggacagcggaggaagtagctagggcatgtgcttggccactgcctccagcaccccaaatccctgcctgaggctggggagagacctctgccggcggctcctcaggcctcccggacccggcctaggaggccagcgttctcctggcggagggctcggtagtcctcccggatcttctccaggttgctgagggtcttcttgcccagctctgtctcgatctgaggcaatgtgaacacatgccccctcagcacacacagcccctttcccagctcctgctcaccagcccccatcacagccactctgggcccctcccaccaactccaacagcctgctctgtcccatggccaggcctcgtgtggtgttccctctacccaaagcatccttcgccatgtggcaggattccccctacatctttaagctgaagcctctgcccatggccctgggaggcagacaggagggcccttggggtggaagctggggctcacagtaggccacttgcctgtcccaggtcacaggcactaaggggcagggctgggtgtccagccatcggctgtgtgtggctccacagcctctgtcagcataacctgaggaactgtccccccggcccgccttggctccccatcctgcccccaggcctcacctgctcctcgaggtctcgaacctcccgcatgatggtgcctgtgtcctcgatggtctggatgagctggctgcagttctggggacaacaggagcagaaggcttgcacccagtcccacccacccccagcagccccaccccaggcacatgtctcccctcacctcgtgcagagcagctagatacttataggccttccgaacagcatcgtccttcttggcatcctgaccagacacagggacctcaaaggtatcagtgggctgcccttgaccatctccatgccctaagaaggccaccctctcccaccaccccactagcttcatcctccatgaaacaaagccagccctgggtatcagtgcacctccagcctcgcacagggcctgggtctggaccccagccagccaattagcagatgcacaaggcagcagcccagcctcaccccactcacccccgcccaacctgccccacaccttgaacacaagctcatcagtcaccgcaaacgtccggtccagcttcccagatagggagttgatttccttctgaagctccttcgtatcagacaagatctggcagacaccatggcagccatgagcccctgcctggggcaggctggctagcagtggagggtcctcatgtgtaccagacagggactgtgtcactgtgtcaggggtgactgggatggattgtgtgtgactattctgtgttagagtgtgactggacagctctgcctgagggtgtgaggtccctgtgcggccacactatgcctgacagcccacatgacccaccctccatggccctggcagtgtaccttggtgatctcttccttctgcttccggatgttgcccacgatctccaggatgcgctgggtgtaggccagccgggacacatctctgggcagagtctccagctctgacatctaggcagggatatagcaggcactgccccaggaccatccccccaccctcctaagctacccaggtccctcacacaggccttaccagctgcttatagacctcctccttcctgcgggcctcttcagcagccgcccggacactctggtgcagttcttggatctctgccagccgtcgagaagattccagctgccatgagcccacaggcagaagacagtgagcagagcatagggatggccccctagagagggaccgagcctgccctggcccgcccacagcccagggccccactgcttacctctctgcaatcctgcagctttcggaggtggcggtactcagcgaggagtgggacccggtgcttctcccactgacccgccaagtggatgacccgctgggcactattctccaccacaagctggtgggggatgggtacatgtcacacaggctgggccctccaaccccaccccaccccaccctgcccctctccgcccagctacagccccaaccccacctgcagcttggcaaggttggcagtcccatcgggcagcagctccaccgcgcggctcttcaggcgcagggcctgctcacgctctgctgtactgagcttgctgtgccggcactcagactctgcctggccggtggatacccagtcacatgccacagcccccatggagctccacagatgactgtacacccctgtggcccccacaggcctctctaacagctccacgctggtgccaaggaccccgaggaccccctaatcccctgtccatgcagacccgtgggtaccccacagatgcccacagaccctccgaggacccctcaatcccctgcccatgcagacccgcggtgccccatagatgcccacagaccctcaccctggcctgattctcatagccaccctcaagaggcccacagatccctaatggctcccaggaacccttctgccatgtgcagacctctacagagcacctcttgccccatctagtccctcacaccccgaggccctccttctgacctagcccaacgcgcagcccctcctccgccccttacctgcacaaagctgacgcccagggtcttcatgtcggcctcaacctcctcaatgctgcggttcactccttccagctgctcccgaagggactcgagctcctgttcctgagctgcccacgtgacctgggaggcccaggccagtcagggttggggtgtcaggcccagtagacaagcaagggcctgggacacccccctccaaaccactctgctcacctgttcaggccgccgggaggtggctggcacatctgacacctgagtggcctgggcctggggctcctaaggggagtgacgaggggcatcctggctgccagggaaggcccttcctcacgtggcccagcctcagcctcccctgagaactgcccccagtgcggcatgcatgcccactgaagcaccgatggtggccagactgtgactatgtgggtaaaggcaccatctgcaacctcgggccagagtgcttgctcgtggagaaatctccctgaccctgtcacagctcctacccacctgccccatctctcaagcctcaaatgcccatgagaaggatggggggccctcagagtgaacatcttaggacagaagatatgctcaaaggaaactgcctgaggaaagggggtgttgccccaagaacacccccacacctttgcatggttcccacctatccacattttctccagtcaagtccctaataagctaggggacccctctgggtacccatcccacagtggggcgagggcctgtccagtgggaacacaggaacctgtgtggataaaggtgtggtgctgacacaaaaagccaccctccaagcctgccacgcccatccacacatctcatgtcctcaggcgcacccaccagatggaaggtgaacttctctgagtgcgtgaagcgggagcccttaggagcaccagtcttggccccagcaccccaggcctgcagcagttctcccaggtcccgggcttgtatgggggccccaagcaggccccagctttggcgcagatgctcagtcagttgcttctgcagccgctgccgctgagcccgtgtgtcctcctggggagaaaaggcgggggaagcaggaaggtgtaggggcccacctagcacccaaggccctgcctcctccaaggaccccctgacaagagtatacagacaagtcacccccaccctccagccttcccactaaggcaggccctgctctactctcctgctccaccagcctgggatctcctcgaggacaggggtctcctcttgctcacagacatacttctctccacccactagatccccatgctggagaaggatgtgggaagagaggggggtgggcctagagcccccaaatccaagagaagcatagacaggatatcgggggacagggcagagacagggaatcaaaggtaccaagcacagaaagaggcagagagagagaggcaagagagggacaacagagtttcaagataatgggaaaatctgattatgaactcaagtattggatggtattaagatatcattgttggccgggtacagtggctcatgcctataatcctagccctttgaaaggccaaggtaggtagatcacctgaggtcaggagatcaagaccagcctggccaacatggtaaaaccccgactctactaaaaatacaaaacttagtgtgctcctgtaattccagctacttgggggctgaggcaggagaatggcttgaacccaggaagtggaggttgcagtgaagcgacatcacgccattgcactccagcctgggcaacagagagagactccgtctcaaaaacaaaacaaaaaaaaacaaaaaacaaaacaaaacaaaacaaaaaaaaacccacaagatattattgttaacttcattagccatgaaaatggtccagtggttaccttgaaaactgaatgtccttatgagttaagagatgtagtcctaagtatttagagctgaaatgacatgatgtctgagatttgctttaaaataatacagcaacaaagaaaaagttgggagagaaaagatgaagaaaagttggcaaaatggtacataggattcactagaatattctctctacatttatgtttgaaaattactacagatataaaaacaaaaacagacagccaggcgtggtggctcacgcctgtaatcacaacactttgggaggccgaggcagatggatcatgaggtcaagagatcgagaccatcctggccaacatggtgaaaccctgtctctactaaaaatacaaaaattagctgggcgtggtggtgcatgcctgtagtcctagctatgtgggaggctgaggcaggagaatcacttgaacccaggaggcagaggttgcagtgagctgagatcgtaccactgtactccagcctgggtgacagagcgagactccatctcaaaaaataataataatgataaaaaaataaaaatgtaaaaagacacagaggtgaagacagaaagagaggacagataaaaaagtggacagaccaggagggggccgacacagaggtggagaaaaagaggggcagacagagatgtggacacagaggaagaggagacagataaagaggcagacagaaggggaggggggccaaatacagaggtggacagagaggaagaggggacagatgtaaaggtggacagaaggggaggggtactgatacctgggtgaacacagaggaagagggaacagaaataggagagcagaatggagggagggaaaaagagaagtggacagagaggaaaaggggacagataaagaaatggacagagggagagggtgacagagaggtggacagagagaaggaggggacagatgcagaggtggacagaggaagaggggacagataagtggacagaggggaagaggggacagatacagagatggatagagaagaagaggggacaaagaggttgacagagaagaagagggggctcggcatggtggctcatgcctgtaatcccagcactttggaaggccaaggtgggtggattgcttcaggtcaggagttcgagaccagcctggtcaacatggcaaaaccccatctctacaaaaaatacaaaaattagccgggcgcacgcacctgtagacccagctactcagatgcctgaggtgggaagattgcttgagcccgggaatttgaggctgccttgagccctgatcatgccattgtagtccagcctgggtgacagagcgagacaccgtctcaaaaaaaaagaagaagagaggacagataaagagatggacagaaggggaggagggacaaatacagaggtggacagagaggaagaagggagagataaggggacagagggaaggggcaacagatacagaggtggacagagaggaagaggagagagattaagaagtaaacagaggcagaggggtgacagatatataggtggacagcaaggaaggggagagatacagaggtggacagagcagaaggggacacagataaaaaggtgcacagagaagaagaggggacagataaagaagtagacagaggagaagggggaacagatagatagacagagcaagagaggaattcagtacagaaacgaggagacagagaggtaagaaagaggagcagcaaaaacacagaactagaataatggggacaggcagaaattgtgcaaaaacctagaaaccagaaaaatgaacatcagtgacaagtgcagaaacagagaaagattagggccgggtgcggtggctcatgcctgtaatcccaacactttgggaggccaaggtgggcagatcacctgaggtcaggaattcgagaccagcctagccaacatggcaaaaccctgtctctactaaaaatataaaaattagccaggtgtggtggtgcaagcctgtaatcccagctacttgggaggctgaggcaggagaatcgcttgaacccgggagatggaggttgcagtgtgctgagatcacgccactgcactccagcctgggtgacagagcaagactccaaatgaatgaatgaattaatgaatgatgaaggcaggtagccaatctggattgctccagttgccaggaatctcaagcacattattcagtctaactactgccctgagaggagagcactattactaccccaaattttagcacaggaaaccaaggctctgaggagggatactgacttgtcccaggttctccttttttctgactccagtgttctttcaggtggggagctaggtaagcacacacagaggggaaacaatggaagggagggacaaagtggggaaggagagcagaggaccagcgggagtgtcagtgagcagcagcccagacagcagggagccaggcatctggctgtacctggggtgggaggcgggatgtccggtggacccagtcctcatcccctggccggtcccggcccgtctgctggcagagctgcagggcatggtgttcgaggagcgaggccacccttccaacaggctgaggcacctgggtagggactggaagcagcaggggactcgcctggaactcccgtggctctggaggcaggaacagagtcagctggccctgccgcatggcaacgctatgaggttcccccccaccttcctcctcacccctccccacagcctcatgctcaccacctctggaactcaattctggcacgaccagcctgctggcatggaaaggcttctggagggccgagccctggtgggagagcaggctcagaatctccagggtgaagtgggatgagggttgccaggggtagggggccaaaaccctgggcacccagacggggacaagagaagatccatgggagtcaggggtctcacctggaggtgctgcagcttgggagtgcgaaggtggggcgggacccaaggcagtgccagctggtcccgaatttggctcccaatggcccggaggagaatagctgagtcacctatgggggatagggaggaagtgaatcagatgtcaatgctgcaaatccaaaagggcataccctaggagaccagcctccactcctgacccccatccagagatacacatctatccagcttgcgttctcacgttcagtcattcaacaaacaccgagcacctactatgtacaggtcgctgttctagacactagggctacttcgtggaacaaactggataaaggtccctgccctcagggagccggcaagctagcagaggagagagatcatgaataggatcctgaataccatccagactgcagccaggtggggatcaggagagggctgcggagaggaggttaacctcaaagaggtaagggagtgaaccatgagggtacctaggggaaaggtaaccaacgatacaaaggtgcagaggcgggagtgtactggggtatgtttgagtagcacccaggaggcccaagtggttagagcgaagtgagagagagggagggcacaggggttgagtcagggaggcccctccccgcaccaacgcaccaccggggtcagctcaacctcagccccctgccccctgccctgtagcccctctctgatgcctaatcctcctgcctagctctcctgaaggcacataccgccacccctacccatcaacctttttaccacctctacctctctcagccctacagcccctagaaggccctcctctcccctcaccgcccccgcccacatcccagacacccagtacctgcaggctggtctgcatcctcagaggcatcggtgggcagacgctcagccaagaagagaagcaggtctcggaggtcaggctcactggggtagaggaagttctgatagccaagctccaagggatagcccaggtcctgagggttggtgggcggctatcaggaagcaggcagggtcctcctgccctgggagacttgggcctaggctgaaaacgctcccactttctcactaaccaccaccctcccaacctcccccagctccccaaggcctctgggccctggggggagtcacagagtgatgatagtcaacgctacagagaacaagaaacaagattaaagctctggcctttctatgactcaaaatccagaggccataaaagaaaagatgggtacttttgaatacatgaaaagaaagaaaatatttaaagaaaatagaataagcaaagtcaaaagttaatgacaagttgggaaaaaatatttggagcccatatcataggtaaagagcaaatctacctattatagaaagagtgcctaaaaataaacaggacaaaaagaccagaagcacaatagctcagaacaaaaggactcatgagggttctgatggggactgaggaaacaggccaggagagaaagaaagcctttttcctttttttttttttttttttgagacagggtctcgctctgtcgctcaggctggagtgcagtagcgtgatcttggctcactggaacctctgcctcctgggctcaagtgatcctcccacgcagcctcccgagtagctgggattacaggtgcatgccaccacacccggctaatttttgtattttcagtgtagacagggctacaccatgttggccaggctggtctcaaactcctgggctcaagcaatctgcccacctcagccacccaaagtgctgggattacaggtgggaatcaccacacccggcctaggaaagcctttttcttccagagttgccactgctttggaactgcatagactctgaaagcagacttcctggattcaaacccaagctttgcctcttaccaactatacgacctcaggcagatcacttaatccctctgtgcttcactttcttcatctgaaagagggtataccaacagtacatatagcagaaggttgtcctgagaattaaatgagttaacaccatgttacttaccacagggcctggcacagagtacacttagaagccatcattattctatacttaggagtatactgggtcacaatgcaagatatatttattttggaggctcaaggtcaaataagtataaccactggcttttaaggtattttactttggattttttccacaatatgcaatcaaagagctgtgactgatatagaaactcattccaggagtggggaaggtgccaaaatatggaggtggctaaggtgcagaaactgttgccaggagcagggcatatgaagaaaagatgccagaacatggcagtgctgagttgcgggggggctacagggacagcacacagctggattaagagaactccttttgcctgctgctgataaaccaaggctgctgggggccagacaaccatatgtacctgttttttatttttttggaaacaagagtcttgctctgtcgctcaggctggagtgcagtggtgcaatctcgactcactggaacctccgcctcctgggttcaagcgattctcctgcctcagcctcctgagtagctgggattacaggcacacaccaccacaccaggctaatttttgtatttttagtagagacagggtttcgccaggttggccaggctggtctcaaactcctgacctctggtgagatctgcccgcctccacctcccaaagtgctggaattacaggagccaccgtccccagtctttttttttttttttttttttggagatggggtttcactctgtttcccaagctagagtgcagtggcgcaatcacagcccactgcagcctggacctcccaggctcaagcaatcctcctacctcagcctcccacatagctgggaccacaggcgtgtgccaccatgcccagctattttttttttattttttgtagagatgggggtctcactatgttgcccaggctgatctcgagctcctgggctcaactgatcctcccacctcagactcccaaagtgctgggattacatgcaagagccaacgtgcccagcccacatgtacctcctggccactggaaaagccatagtcactaacccccactaaaatcaatgtaagcaaaagcaggtgaacaaaatccaagagagacagcactgagggaagaacagagaactgcaggaagcctgagcccccacctcaacacctcctgctgtgtactctcctctgcaaacagaagacataacttcccccctattaagtgctaaccttaagaatacatacagtcctgggccaggggacagactgcctgcctcataaggccaccaagagccccagagagaacaatgtgacaactcctgagagctgggtgaacctgagagcgaagggatggatggagctctgagacctgttgctaagagacagaaactgcataagcaaggcccaaatttaacaactctagccacccagtcccctatatctaaatgaaagttttcacggtagttactctatcgtccctccaccaccatatacttcctgggtcagttcaaagtgtttccattcactatgtattcacaggttccagatcggacctatccaataatagtaatcccatttatgcaaagcttattataaccagcttttcacacattaactcatgtttaatcctcacagcaaccctatacagtagctacaattcttatacccattttacacatgtggaaacttagcctcaaaaaggttaagagagccagacgcggtggctcacacctgtaatcccaacactttgggaggctgaggtgggtggatcacaaggtcaggagttcgagaccagcctggccaagatggtgaaaccctgtctccactaaaaatacaaaaaaattagccgggcacagtggcagacacctgtaatcccagccactcggcaggctgaggcaggagaattgctggaacccaggaggcggaggaggttgcagtaagccgagattgtgccactgcactccagcctgggcttcaaaaaaaaaaaagactggcccaaagtcacagagtgagtgagccagggggagtggcattacttgcagctcttgaatacaggaactggactcctggactcagctctatactgggaatgggtgagtgtttcatcagaatggctctttaccaggcacagtggtgcacgcctgtagtcccaactactcaggaggccaaggcgggaagattgcttgaggccaggagcttaagaccagcctgggcaacatctctacaaaagcgagaccccatctctacgaaaaatttaaaaattctcgggcagggtggcatgtgcctatagtcctagctactagtgaggcagaggcaggagaatctcttgaggccaggagttcaagaccagcctgggcaatatagcaagacacttacctctaaaaaaattaaaatattttttaaaagaaaagcactttatttattctgtcacagagacattgttggaattgctcttagcagaggcaggatatgtggttcccacagaggtaatatagcagacactcttttgggtaaccagcatgcctttctttgggtaatcatccttatcccaactccacaggatcctgaaggagtggctaatcacagtgtcctataggaatgaccgtgtcggccgggcgcagtggctcacgcctgtaatctcagcactttgggaggccgaggtgggcagatcacgaggtcaggagttcaagaccagcctagccaacatagtgaaaccccgtctgtactaaaaatacaaaaattaactgagcatggtggtgcatgcctgtagtcccagctactcgggaggctgaggcaggagaatcacttgaacccaggagacggaggttgcagtgagccgtgagctgagatcacgccactgcattccagcttgggtgacagagagagacttcacatcaaaaaaaaaaaaaaaagaaaaaaagaaaagaaaaggctgggcacggtggctcactcctgtaatcccagcactttgggaggccaaggcaggtggatcatgaggtcaagagattaaaaccatcctggccaacatggtgaaaccccgtctctactaaaaacatgaaaattagttgggtgtggtggcacacgcctgtagtcccagctactcgggaggctgaggcaggagaattgcttgaacccgggaggcagaggttgcagtgagccaagatcgcaccactgcactccagcttgggcgacaaagtgagactccatctcaaaaaaaaaaaaaaaaaaggaatgaccatgtcatccagactgggccaatcagagcacagagtgattagtttaggagtatatgacccagacagagtattttctggaactaggaaatggatactatggggtgggggtggtattttgcagctaaatttaaaacatagaagccaggagcagcccaggtgcaaactggataaactcatttgctcctcataaaagcactacatttatcatctccatttcacaaataggaaaactggggcccagaagggttagggtcacacagttaccaagtggtggggctaggatctaaactactcaggcagtttggcagtacagtcagcagccttaaccactaatgaaaactaagccgcaggaaaaatgacagaggaaaggcaagtgttgcagaggaaaggcaagtgttgcagaggaaaggcaagtgttgcaaaggaacttggttactttgtaaaagaggaagaaagaggatgtgtgcattaggaggagggccactcaccatgcaggcctgagccaggctcatggccaggcggaaccgggcagacatggcaagaggcagcagagggctgaggccagagcccaccgcagggttgatcacacgcaggcagcggaccacagcctctacaaccagctcagtggtgaaggcgcgcaaggtctgcacatctggaggaactgccctgaagaaggggaccagcttgatcacaggaatagtcaggcaacagggatcaggctgagccctgcagccttttggaaacactagtaccagggtcggggcagggaggatgcctacagttcagacagatcctggatgttggtgactgtgacttccatttggaaaaccaggaactagggaaatcctcaagtcctaagatcttggagtaggagaatggtgggtggaagagaactcagtttagaaaaatatcaaaatttgggagtctgggaaggtgaaagggtccaggtggcacaatctctgggtttcttggttcccagatagtatgttctttgcatacatattgagctgctagagttttgagaagactagattttaggaggctgctgttttcagaagttccaaatgtcagggtccctgggtatcaagatccctgaatatcaagaccacctagtttcaagcaatacaaaaatcagactccctagatgttggcatcctgggtttttagggcctctgaacggaggagtcttcgtgcgtcagggtgaccaaatgctgatgtcagattttagaattctgggtttttttggctgggcgtggtggctcacacctgtaatcccagcactttgggaggcggaggcgggcagatcacttgaggtcaggagttggagaccagcctgaccaacatggtgaaaccctgtctctgctaaaaatacaaaaattagccgggcaaggtggcgcacggctgtaataccagctacttgggaggctgaggcaggagaatcacttgaacctgggaggcggaggctgcagtgagctgagatcaccccactgcactccagcctaggcgacagagcgagactccatctcggaaaaggaaaaaaaaaaaaagaatcctgggtttttttaagccccaggtgtttggggaactggagtttgaaggatcccaagtatctggtccagggattttttggagtccccgagtgccagggtcctggggttttacgctccctggttcttagggcacaggtgtcttagggtctccagataacagggtctcagggaactgatgttaagattccccagattacagggttccgggtcttgaggtttcaaggttgtaacgtctcaaggtgtctgggtcccagagctttgggtgtaccaaatatcatggttaaaggatttgggaggcctctgatgtcggtgtcagggagggcggtgtgtgtgtgcgtgtgtgtgtgtgcgtgtgtgtgtgtgtgtgtgtgtgtgtgtgtgtaagggggtgagggtcttaggatcctggagttggagccctgaatgtcaggatcccgggttttaaggttcccgggaaacggggtcctgggctttagagtcccggatgtgggcttcgggggtgggcgggggctctgtccttacgtgccggcctggcgcagcgaatggatgaggattcggtccgcctcctccatggtggagccgtgtcggagtcgggggctgggtccaggaccgggtccgagaaagtggggagcagctgtagaaaccctgctccgtgctcgcggtccacagagtgtcacgggtcgtgtggggagagttggaaagtgtagttctgtgagcgagcacggcgcatgccggatgtgaggcctggggtgagtgtgcacggaggttgagcttgcaatagctgctgggaactgtagttcttccacctgcagtccagtgggctcttccaagggaaaaaggaacaacccgtgtggtggggagtggaggggccggacagaaaggggcttcctgactcattcgtttaaggcggcattcatcttctaggctataaaagtgtacacattaagggcagaattttaacacaaagcgactacttccctgtgtcttagtctcctcatctgtaaaatgggactattgacagtacctgctttttaggattaaaacagaattaatttatataaagcacgttgtactatgtgcctgacacataagataagaaagcactatgtaagttatagttactagtgtccatgcattcaataaatgctttaatatgatacacatttgtacactccaaagaataattacacagcaaatatctatgtaaccggctgggtgcagtggctcacgcctgtaatcccagcactttgggaggccgagtcgggtggatcacctgaggtcaggagttcgagaccagcctggccaacatggtgaaaccccctctctactaaaatgagaaaaattagccaggcatggtggcacatgcctgtagtcccagctactcgggaggcttaggcaggagaatcacttgaactggggaagcgaaggtggcagtgagctgagattgcgccattacactccagcctgggcaacagagcgagactccgtctctaaataaataaataaagcaaaagaaatctatgtaaccatttcttgaacagccgacgcgcacctgcaatcccagcagttttggaggccaaggcgggaggatcgcttgaggtcaggagtttgagaccggcatgggcaatacagcaatacaccatctcttaaaaaaaaaaaaaaaaattgacacttgtccaagcagacgtccccagcagagccagccagcatgaccgagcgccgcgtccccttctcgctcctgcgggaccccagctgggaccccttccgcgactggtacccgcacagtcgcctctttgaccaggccttcgggctggtcgcagtggttgggcaccagctgctggccccgctacgtgcgtcccctgcccccgccgcggtcgagagccccgcggtggccgcgcccgcctacagctacgcgctcagccggcagctcagcggcggggtctcggagaatcggcccacagcggaccgctggcgcgtatccctggacatcaactacttcgcctccgacgagctgacggtcaagaccaaggatggcatggtggagatcaccagcaagcacgaggagcggcaggacgagcatggctacatctcccgatgcttcacccggaaatacacgctgccccccggtgtggaccccaccaaggtctcctcctccctgtcccctgagggcacactgaccgtggaggcccccatgcccaagctagccacgcagtccaacgagatcaccttggagtcacgggcccagcttgggggcctaggagctgcgaaatccgaccagtctgcagccaagtaaaagccttagcccggatgcccccggccgccgccactagccgtgcccccgcacccacctgtgtgttcttttgataggtttatcttctgttgttctcaaataaagttcgaagcaacccaaaatttaaaaaaaaaatagttgggcatggtagtgcacacctgcagtcccagctacagaggctgaggtcagaggatcacttgagcacaggaattcaacgctactgtgagctatgatcacgccactgcactccagcctgggtgacagagcaagaccctgtctctaaaaataataataattgataatatttgatcttttttccatagagatattgcacatatattaggtttttcctatatacttcgaattccatatactactggaaaatgacatcgtttttcttattttagtttgactgtttgctgcaggtatatatttggtaaatatttcatctgttgccaggctctggcccacaaacgtcccatttgcacccccaccgccaccctcccatacaacactgttattgccc

SEQ ID NO: 1206 - DNA, 25598 bp, Homo sapiens
tagctaacacctgtatgatactactttgagccagactcggttctgagcacctttactcttatcccgtaaagtagatgctataattctgttttacaggtgagggtcctgaggcatggtgtagttaaatgcgttggccaaggtcacaaggccagtaagtggcagcgccaggatttgaacccaggcaatctatgccagaatccacactcttaatgctgtaagaaaaaccatgctgcctgccccctttaaatgaagtctcagattatggtggggctcacaggtgggtgagtgggtacctgcctgcctgctcagttacccaggcacatctgcccaccagaccggagctagacctttctgaaccactcacagcctaaggccttaccagaaccagcagaacccacaaatgtcttactgcagccaggggcttctgaccaagcgtatacatacaaggtccaaaaagcattttcccatttccattcccagtcctcccaggaacagggaaatgtatacattttagggagaatctagtgatcctgggccagacttaggtgaccgcaaaaagaatcaggactagctgctgcccttaaagaactcatagcttgatagaggaaacctagggaaatcttctggggccccctggggtataactgattatttctccctgtccctaaatgatcacaggtggtgtggcaaaaaaacaagggacaaaaacttcaagtccagtacccatctggttctgtctctctgctagagccactgctttcttgtgagagcatgggctcagcccctcgcctccacaggactcaaaagtagattacagcgttaacagtagagtgcacaggcttcaaggtcaggcatgggtgaactggaagagccaggtgccatcactgcctcaaccagtttctccacctctggaatcctggtttcctgctctgtcagaaagagaatctgctctaccccccactggcaaagcccttggtccacactatgtcattgcagttctctccactccagcacactgctgatcattcacaccaagctcatttccaccccaggactttgcacttgctgtttcctctacctagaacacccttgttccatatatgcacataactgttattcatcatccaggacttagtttaaatgaaacctcctcagaaaagtcctccctgttccttttcctacaaactctcccccacctccccaccgtatctgcataactcttctttatcatcattcgggactcacctcctcaaaggccctccctttaacagcatgtctgacacagtcattccctcccaatctatccccttactcccttcagcagctaactttgtccctatttatcctatctgcttgcttgcttgttttttcaaactgtctcccataggagcctgtatgaatccttgagggtagggtagatgtctgtcttgttcagggctttacagtggaactcaataaatggaggaataaaaccccagttaaaacagtgcctagcacgtgtttgacctccatcactctttgactgactgactcaatgcaccctcctccctgtcctggagagcaggcctgaggggttcctgggccggaatgcttgtcctccatcccagacacagccctgcgttggcggaggtggcgctggctgacattacctgcgcctcaccggcttcatgcagctcttcagctgcctggcctcagcctccacgggaccctggcactcgggctgtggctccagctgcggcagctgctgctgctggggcagcccttcggcatcagtgggtgtgggagcgggtgcgatccggagcaggactgtgtagttgcggccgtggttgttggcccagaaagtgccctcaggggtctcatagcgcaccacgaagtcgaggcgcgccccatcgcccgcgccctcagcaaagggcagctggaaggcaaagcggtcggtgcggccgccgtcgtcgggcgaggaggcggatgcctggccgggacccaggccgagccccggatccaggatgggatctcctgctcctgttcctcccgctcctgcccacggcgggctgcgcgggacgtagcgcgctgggtggtcgcaaaaggaagcccagccgtcgtgtgaggcccgcacgtgcaccgccttctcgaaggagcggttcagcacgcgtaccaacccgcgcagcaccggcgggcggcccccaggcacccacaccccggcacccccggggaccgctccgggaggcggcagcagcgcctccagctccaccatgacgcgccccaagcgctccagacggcccggcgcgggcggcagcgaaaatgtggggaccaggtaaaaccccccgccagcggggacggggcacagcggtgagggctcggggcaagcctcctcttcctcctccccttcatccccatcctcgccatcgtcgtcctcgtcggccccgccgccgccgccgccatcttgcccggccgccgccgccatcttgcccgccccgggcccgccccacggccggtagcggcgcaactgcgccagcggcagccccaaggcctcgtcggcgaacagcaccctccgcggggccaccgccgcctcgaccgaggtgcggggctcacccgcggccggcgaggggggcgcggaatgccgcagcgggggctccacaggggccgtacgcgccatatcggcggcggcggcggcaccgacggcaccggcggcgggaccggcgggggcagggcctgaaggggcgggcagccaatgggaaggccagcgcggaggggtacggctcacgggggcataggcggtgagatgaagacaagtattgcagagggccaatgggcagccatgcacggatgacgtacagcgaattgagagccggagaagcacgcagccaatggggatgcccgggagtgggcggtgtagggggcgggatgatcgaggaatcaatggagaggccggaatgggggtggtgcgaaatccatgatgaagaaaacagaagcagacagctaatgcggaagtctgagcgagagaggcatgtgggcggtgggaaaagtggaatggctacaggcgatgagggcagccgggaacgaacgcagaggcccaaaaagtgggagatcccgcgggttgcgtaggcggtggaacggtagctagagagagagaacagccaatggagagccacgcgtgggatgacgacaatggctgcagcgagccaatggggaggcttgtgagcgtgcactgcggcttcgaaggggtggtgccaaggtggagctagccaatacgaaggctaaaaggagaccaagaggcgggtgtgtagggagccgagccaatggaggtggaggctgaaggcgggagcgaggacgagagctggcggatagccaatgagggagccagggtgaaggcgtagagacctcaaaggacagtactagtatgggatgagccaatgccgaggctagatagtgcagcgggacggagggaggacttggaggcaagatggggaaaaaagcagagccgacgggggcagtgtaggtggtgtgaagggaggcatgagtagccaataaggaggctggagaggaggacgctgtgtagacagagtctgaggtattgggtggccggacagcagaaccatagaacgcaggcagccattaggaaaaatgtgcttctcagggatggggttaccctctccctaaccctccgtgactccccattgccccaggaatacccagagcccctgaaggcctagaccacaccttggtgtgtgaactaggaaagtgaaaatgactgtcctgttgcagttagttacttactgggtcctccctgcccaactacaaccttttcttgagcagtgccacaagccaagaatgcccctgattgttagccgcaagcactctccaggacttgatactattgttgaatgaatggccgaataggaaatttaactttctgaaggattcacttttttaaatttcagctcagcaaacactgacctgactgtgtgctaccagaagttgattgggcatatgggtagcttctgactaatggaatcacaatcaaagccctgtccttcttgcccaacctgacactccacaccccacaggggcctcacctcccttctttctgtccccccatctctgcttctactgttccctctcccaagagtgctgttccttctgctgcttccatctagtaaactcctttcgctctccctttggggtctcaccttctgtgggaactcaactgcagcttttgtccgctgaacacatccattcatacattccttctccatcctgggaagatttactgaacacctactgagtgccaggttctgagcatgctgttatctcattagaacctcacagcatcctaggagggaggtgatccttccagcagcccctctccccaggtctccatgttcaggatgtccatgagttagaaatgaatatgttcagctgcaagtaacagaaaaatcataaaataatgggggcttaagcaagacagaactttatttttttctcacctaaaagttcaagctggcaaatagtccagggactccttcctgcccacctggtttgggcattgtctgtcccgatctggctccaagactctcagtcttcaacaaatccttttggctgtctattaaaaatatttaccaaatccatcctcttctcaccacctccactgccagcactatcaccagtcacctagactactgcagtagccagctccttgctggtcccctgcttccacattcaggccctagaccccattgtacactcagcattcaggggcttcctgttaaatcctaacacggtttgtgtttctcctctgcttgcaaccctgtcatgccttcctcctcactcagcgttgaagccaaagtccttaccatggcctacaaggtcctgcgtggtctaacctccgagtcccctttctgacctcacctccagcttctcttcttgctctctccacactaaccacaccagcccccttgtagaccttgaacaaatcaggtacattcccacctcaggacctttgccctggctgtttcctttggagttcctcagatatctagctggctccctccctcatctccttcaagtctttgtcagaggcccctgtctctggggacttttcctgacccgtttaatcttgcctactcacccccaactcccagccctcccagtctccttcccgagaagccctccatgagagaggatatagtccagtatagaggggaggtagcgacctctacccctctctgccctcctgaccccagcccccattctgcaaggatcttggctttcagcagccgtagcatttccctctcacaccctgggcctgcccaaggggccagctcacattctcggccaccatcctcacttcgtttgcctcctatatctctggccactctctttcatggagtgagtgacagtaagggacagatggtctggggaaggtataaggagaatgcagcccacacctctgatcctgagagagaaaactagcccccttttccaggagggggacaggtgctggggcagggaacaatgcctctgctgatagaactggcctggtttataattacgcaggaggtgtagggaacattccgacccaagtctgcagggagcaaggggttattaactatgggaacatcagtgcaagggatcattaaccttaggaccatcactgcaaggggtcattaaccttggggccatcactagaatcagctccccaggactccttcctgacatgcatgctcctcaccccctcccttgctccctcccacatgccgtgacatctgttaaacacctgctgttcacagggtccctgcaggcctccaagcaggggacctcatcccaccttggtgcctcccctggctgtccaacacacccaagccatttttgggtctcagatgtgtcccaccaactcagaagcctcaaccagcgaaagttttgttttgaactaatggtggggagggttgggtgttttttttttttttttaattgttgttggctgatttttttaaggtctttttttttctattctttttttttttttttcttgtcttcacaaagccaggccatcaggcccattctgggcttttccagaagggtgagtctgagttgaggaaagaggccctcctttttacgagggcttagaaggttgggggaggaaagggggcaaaggggtgaaggggtggatcttggccaccagatttgtaccatgtaaataaaaagccctttccaatttctcttccccaggtctgaagccagtcttgtagagggctggagtggttgttggacgactagaaccctgggctttgcagggtgctgggagctggaagtcttcaccatggcctgtcaggagaagcccctgggggctggtctaccatgctgaccagtggttgaatagagtgcctgctgaggtcaagagatgcagccgccaattcctggacaacctaaaagcctcacaagcttcaagtctccaaggactctccaaatcccaggatctccctgccatcacatcctagaatttaaaacctgagaacatcaagttcaggaaagcttggggatttcaaagcccagcaccaaagaaagcgggacccacactcgccagctctgtgatcttgggcaagttgcttgactacttatacctccgtttccctcatctgtataacaggaatacaataatgatgagatggagctcaaggggccatggtgaggattgaacatgatcacttgtgagacatgttcagcactgtatctgacccatggaaaattcaagataaacatcagctactgagatgatggcggatatttggaatcctaaatccttggaaactggggctttttgaagtaaaagaccccaaaggctgagggcctcagaagcatcaggccatgatgttcctgaaacaagagggtcagggtcccaatgggcctctggggttcatcgtgaggatggatgcattaatattggggacctgctagggaccttcccagtgggacagtggctgggtcagggcactcaagccctaaaacgtgatgaggcgagacttttctctctttcctcattcagtaactgtcagtagattctgggagccagggattctccgactcttcaagtccatgaattttaggggatgacagtgggctctccgctttctcctccatgaagtaacttacatgcccctcaccctctgtgggaggggtgttgcagggggtgcagaactcccctcgccgggtagttcaagcaatggggaccatatcaattccatctatagggaaactgaggcctggagtagggcgaggcctctgggaacccagccctattctgtctctttccctggcatttcccatccacacatagagcttcagattctctttctttccccagagaccctcaaatatcctctcactcacagaatggtgtctctgcctgcctcgggttggccctgtgatttattttagttcttttcccttgttttttttttttcaaactctatacacttttgttttaaaaactgtggtttctcatgagccctattatctcattgatacctctcacctctgtggtgaggggaagaaatcatattttcagatgactcgtaaagggcaaagaaaaaaacccaaaatttcaaaatttccgtttaagtctcataatcaagaaaaggagaaacacagagagagagaaaaaaaaaactatgagaacccccccccaccccgtgattatcagcgcacacactcatcgaaaaaaatttggattattagaagagagaggtctgcggcttccacaccgtacagcgtggtttttcttctcggtataaaagcaaagttgtttttgatacgtgacagtttcccacaagccaggctgatccttttctgtcagtccacttcaccaaggtgagtgtccctgctctcccctaccagatgtgggccccattggaggagatggcagggaggtaggcacggcgggggggtcaggggccctctggtacagtgggatgtacccagctaccgtgattccagccaggtaaggtctttaaaaaaataataatagaataaatggcagaagacttaaaggtgaagtacttaatgcatgggcaggggcaaaaataaatgaattcatcaattgatacgtagatggataggatttttaaaatatgtcagctgccagtctttatggatttcagagctttgaacaacttgaaatgctgtccaggtgcaactgaaaatttcaactgcatctctctcatctctttgtctcttagctcttgatgcctctcatccttctctgtctctctgctcaccctgtcttgctcttttacatgtttctctgcctctctttctcccgccatctgtctgtcgctacactcagactctctttccccgcatctctcctggcctctgaccatctcccctatctctgtctcctccatcttgaccacactccatcgatctcctttcctccatctctcccgctctcttttcttgccttcccccacctgccttcccagccagcatccagcctagagctttgtacacagctggcgtttaataatagtaatgtcgccgaggacctttacattttatgagagtgagcatcagttctgttcaccctagtagcaggaggattgcaaggtgccggggcaagctgagcacttaactgaactttgcttgtatcgctttagaggagacccttggggcgggggggcagggagcacttcacaccattgtcaaccgtagtttagctgtgtggacctaccccaggactgcatgtgtgtgaccagagtccatattcaggaagcaaacaggttgttcagggctggggtgagctcgattctgcaggcttagcacagcgtttggcacaaagtaagtgctcacgaagtgttagctattagtatttctgtaaccaaattagaatcatgctatatattggttttgttcctgctttattcaattaacagtagtgtttttgaagcttactaaaaattgtttgaacacatgatctttcatgatggacaagactgtcctcacatcagcatgaactttgattgatttgaccaagtgccgattgttggacattccggttgtttctcgtttttttctataaacatccctgactgcttccttggattcctgaaaagggagttgctggggcaaagggggcgtgcatttttaaagtttatgaccctctctgctaattctccttccaaaaggttgtcctattttatgctccctctacttaagctaaccctaggtgagtattattatgttttaattatttcccaacatgacaggtaagaaaaacacattatcacattgttgaaatttgcatcttgtgattacttttactattcattggccattcatgcttttttttttttttttttttggttgtctggtcatgtccttactcctaatagggtgttcatcttatttttcccttattgatttgccacagctctttatttggaatggttattaacctttcatcagccattacatatatagcaaatattttccccaattcatcatttgctttttttctatttgtttatggtgttttttgtgatgcttatgatggttttatacagtcaaataggttagtctttttttctgtggcttctgtctctggttttgtgcttagaaagtcctttcctacttgaaaatgagataaatgttcacctatgttggcttctagtctcttttatggcttcattttttccatttactatagaggttaagagtgtgggtactggagccagactgtctgggacaaacccagcgtcaccccaagccctatgtgtgatttttagccaggcacttaacctctccatacctccatttcctcatatgtactgcaatggttataatagtaccttcctcaggagtctttgtttagattaaaatttttaaccacagtaaatacttagcacaaggcctgacacacaataaacccaagatcagcattaggtgttaaaacttatatcttgaatggatctgggcattttagggtatatgatgatggtgacatttcaaactgggcagggaggggttgttgggataatggactgactattcactcaataactttatcttctccctaattatctcagacacatttgttaaaccatactccatggtcctccagtttgaaatgccacattcatcacaaattcagttctctccatatgtgggtccatgtccaagctttctattctgttctcttccccagtatctgttcttataccagggccacactgttttgctgattgttgctttgcaatacaattcaatacccagccatgggtgtccctggcaccttgcccttctttattcttgattatttcaggcagcatcagttgaaccagccagagaccagcaaatgttcttatttgaggcaatcctcctctcgcacacatgcactctggctctccatgcatgtgtccatttctctcaatgtctctcactatctcttgttctctcttgctcgctctttgtgtgtgtctctttgtctctatgtatccctatctctcagccagtcccctggatagaggggcaattgtcaacttgaagccctgcagacacctaatgacttaaccagacagcgtagaagggccctggcccttgtctactccacgcctctccgtgctcagtgtagaagggcaaattgaagaccagagatctcagggcctcaccgaaatgcagcggcagagttgaaatccaagcctagatctcaggactctaggtgggaccctggttctggctctctccccaactgaaggcctcagtttacccctcagcacccagaagggggaaggggaacctgggctaccattcccccttctgccttctcacacgttggaccccaacttcccacaggttggacgatccacgatcacagtgtggggcccagcctcacaagagctgggctaggtgaggccccggactccataggtcaggaggcctagttggccagagcgtggtgatgatggaggcatgtcagtcagtcaggctgtgtgtccccagagctggtgctggtccccgaaaaccttgattgtggggcccctctagagagtctgatgatgggctctgtattggcgaaggctgaggcttttccagctccccccatgaggcccagaccaaaggcacaccagcctcaacctcctcctccccctgttgccatctctggcggagtggccatgtatttgggaacgttgttccagagtggacagggagactgaggccctagggaggctggctctgtttccaggcctggtaggcaagaggccctatgaagcagcaagctgcctgactttcagatggttccaaggagtttggacaccagggacactggcctacacatactgagactttgggaccgtagaccccacagtctgtggttttgagattctaggatcctttaaatctaagaaatgctgttctatgattctgaggtcctggtgttatactatttgaagaccccaggggtcccagtatctgtggagcctgcctggcactctcagagcttcaaacctgggtcctctccacaacccaagaagggccaggtcttcagagctaggggcttgtcatagtggccagatggacatcacctaccacatccaccagcacccatgtcaccccacctgggccaagcctgctgcaggacagggcagccagttctcggaacgaaacctgtggggtggggtatctgccctcttctcttcctccgtggtgtcgatgaagcccggcgcatccggccgccatgacgtcaatggcggaaaaatctgggcaagtcgggggctgtgacaacagggcccagatgcagaccccgatatgaaaacataatctgtgtcccagaaacatcccccattcagcttctgagaaacccagtcagaaagggacgtcccaacagacagtgcaggaagccggctgcccagcccggccctctaggtcctctacccccagacagatcatctccatgtccctgtctgagaatgtatctatgctttgctgagtcaggccatcccacatgtgtttggggagaattcttagctctggccaagtgtccaggcagcttcagaagtgaccacaggccagccacatgggccaggccagagtggtggaaaacatccatttgcaccgaaatcggtattagtttgttctggctgctataacaaagtaccacaactgagtggcttcagcaacagaaattgatcatctcacagttctggaggccagagtccaagatcaaggtgttgccagggttggttccttctgggggccataagggagaagctgctccaggcctctcccccagcttctggtggttgctggcaatctttgttatttcttggcttgaaggagcatcaccccatctctggcttcattcattcactcaccttctcatctcaccagtgctctcccaggcccttgttcggagcctccacagacccacactcctgtttctcacgcagtaatgttctaagcccccaggagactaagaacttaatacctggattctcacactcatctccctcagcaccacagctctgacaaccacccccaggaggtgacagcaaagaaaggaaggagcaactgctcccccagaacccttctatactcccccgggctgctctcagcagctgtgtgcccaactcagtgctgtgaggtggaacggggagatggagacacacacacacacacaccagagagtttataaaatgtgcacacggaaacacttcctaaagaaagaagtggagttctcaagtcactatgggactacggaactcggcatctgagcatccccttctgtataatggggttggctgggcagtcccttccagctctggcttcctctcagaccaggattataggatcctgaaaagccagtgcttccctcagggagtggaaggttctggggctcagcagggggcccggagccattgtggagggctttcaaggtgaggacaatagaagagcaggtcttgcgtggcttggacagggaaagaggagaaggagtgggcatttgaggcagggggtgtagcatgagccaggcttgagggccagaaattggggtgaactctgatgggggctgggtagagaagcttctacaggccccagctcaagagaccccatctctcctcctctctgtcacttgccatgctggatccgtgcatgatcacactcctggactcgcctccttgccctgagatccagacccccgtattcagctgccccctcagctcctccactcacatatttaatgccagactcttcatgtctatctacacctgcacttttgcacccaatccaactccccgccatgtcccccatctcaggtaatgtcagctcggtccttccagctgctcaagctaaaacccatgtcactttgactctccctcttgcccactacatccaagctgctagcactgctcctgatccagcttcagattaagtctcagaatctacccacttctcgccttctccactgccaccagcccattctgtgccagcatcatcacttgccaggactgttacaatagcctcctcactagccccactcacagcagccagatgaatcttttgagtccatgcctagtcactggggcaaaataggactccgaggagaaagtccgagaccagctccggcaagatgagcaaacacagcctgtgcagggtgcagggagggctagaggcctgaggcttgaaacagctctcaagtggagggggaaacaaccattgccctcatagaggacacatccacaccagggctgtgctagcgtgggcaggcaagccaggtgctggacctctgcacgtggggcatgtgtgggtatgtacatgtacctgtgttcttggtgtgtgtgtgtgtgtgtgtgtgtgtgtgtgtctagagctggggtgcaactatggggcccctcgggacatgtcccagccaatgcctgctttgaccagaggagtgtccacgtggctcaggtggtcgagtatctcataccgccctagcacacgtgtgactcctttcccctattgtctacgcagcctgcccttggacaaggacccgatgcccaaccccaggcctggcaagccctcggccccttccttggcccttggcccatccccaggagcctcgcccagctggagggctgcacccaaagcctcagacctgctgggggcccggggcccagggggaaccttccagggccgagatcttcgaggcggggcccatgcctcctcttcttccttgaaccccatgccaccatcgcagctgcaggtgaggccctgggcccaggatggggcaggcagggtggggtacctggacctacaggtgccgacctttactgtggcactgggcgggaggggggctggctggggcacaggaagtggtttctgggtcccaggcaagtctgtgacttatgcagatgttgcagggccaagaaaatccccacctgccaggcctcagagattggaggctctccccgacctcccaatccctgtctcaggagaggaggaggccgtattgtagtcccatgagcatagctatgtgtccccatccccatgtgacaagagaagaggactggggccaagtaggtgaggtgacagggctgaggccagctctgcaacttattagctgtttgatctttaaaaagttactcgatctccatgagcctcagtttccatacgtgtaaaagggggatgatcatagcatctaccatgtgggcttgcagtgcagagtatttgaattagacacagaacagtgaggatcaggatggcctctcacccacctgcctttctgcccagctgcccacactgcccctagtcatggtggcaccctccggggcacggctgggccccttgccccacttacaggcactcctccaggacaggccacatttcatgcaccaggtatggacggtgaatgggcagggaggagggagcaggtgggagaactgtggggaggggccccgagtcaggctgaaccacagcccacatgtgccccccagctctcaacggtggatgcccacgcccggacccctgtgctgcaggtgcaccccctggagagcccagccatgatcagcctcacaccacccaccaccgccactggggtcttctccctcaaggcccggcctggcctcccacctggtaacacctcagcccgtaccccatggcttcacagaacccccaagtccccagatccttggctgtgagcagtgtaggctattctgaattgcagtactctgggggtcaaaggtgtcaggtctcagaggcttggaaactccaccctccaaaaaacgtcaggtgcagaaccttaaagatgcagaatgtcaaaatcacaaaaccacagagctttacaaagctagtcaaaatgtcagcacctgcgaatggccgtctttaagcttctctgccagaagcctgggactttggggacagcagagccccctgggagtcagggttttcgaggctcaggagggtgggaagctcaaaatgagaggccttgtgggccaagctccagagcccagcccacagcctccataggtgccctgtccccacccacagggatcaacgtggccagcctggaatgggtgtccagggagccggcactgctctgcaccttcccaaatcccagtgcacccaggaaggacaggtcagtggacagggctgggaaggatcctcgccctcctatcccctcccctgacaccctctgtccccccagcaccctttcggctgtgccccagagctcctacccactgctggcaaatggtgtctgcaagtggcccggatgtgagaaggtcttcgaagagccagaggacttcctcaagtgagtggcccaggcctgtgccagtctaccggccctggcttgtggggagaggtctagggtgcagatctcagctcaggcttcatcccaataagtagtaagatgcaagagctaaactctgagactgtgggttcaaatcccagctccatccctgactggctgtgtgaccttggacaaattacttagcttctctcgacctcagttttctcgtatgtataataagaaacgtttgtgctgttatttacccccattttacagacaaggagactgaggccaaagaggttaagtgtcttgatcaaaatctcccagttcctgagtgacagagctgggatttgaacccatgtagccaggctctagaatctgcactcctgctttgccctgctactcctcatgccaacatgccagccttattccactgttcccaaagttctagctcctctagatggctgctgctgcctcccctcagtccccccatatgtctctctctctctctctctctctctctctctctctctctctctctctctctttctctctctctcacacacacacacacacaaatacacaccacactacacacaacccttagcagcaaccccacatgtcctgtcctccttgcagccaggcctttgcacaggccgtccctccacccagaatgctttgcccactctcacctccctggcccattctcaactcaccacacttccaacattatctccagcactctggccaggctcaagtggtgagttcaggcctgacatgcagtaggtgctgaggggcatgtgttaagggaacgaggggtgtgagagggagactgaggtagagaggggaggggagctggggctcagaggagagaactcccagagggtctgggccctccccattcagagcattgagccagaccaggcctgtcgtggtcacctgcatggaatcttctccctacttaggcactgccaggcggaccatcttctggatgagaagggcagggcacaatgtctcctccagagagagatggtacagtctctggagcagcaggtaatgccagggcggtggagggtaagggatagggatagtgcgcaaaaccttctgtccaccatgtgccagaaaccaagttcacctgggacgagggctggtataaaggaaggaagaggagcgggcactcccagggaagaccgtagcctgggcaaagatgtggcagagaagggccaggctgaggcctcatgtttgtgccatttcacagctggtgctggagaaggagaagctgagtgccatgcaggcccacctggctgggaaaatggcactgaccaaggcttcatctgtggtgagcgaccccaggactggtggtggcagactcagactgctggggggcagggaggaggtctgcacggtgcagggaacctaacctcacattcaggtcctgagagctaggggcccctgtccccagctccaaacatgcccagacctggaaatctgtccccttctacttacaaaccctctgaccccggctgggcgtggtggctcacgcctgtaatcccagcactttgggaggccgaggcgggtggatcacgaggtcaggagttcaagaccagcctcgccaagatggtgaaaccctgtgtctactaaaagtacaaaaaattagccaggcgtggtggcaggtgtctgtagtcccaactacttgggaggctgaggcagagaattgcttgaacctgggaggcggagtttgcagtgagctgagatcataccactgcactccagcctaggcgacagatcaagactccgtctcaagaaaaaaaaaaaaaaaaaaccctctgactctaagatccccaaacactgtgatcctgagttgttaaagcaaatgcaaatagccagacttgccagatgcaggctgtgtgccagcaggaccagctatgtaacctgcagggccccttgttcagatttcaagatggcgaccacagagcattaaacaaagcacagggtgccacataaccacataggtcacacgcccatgaagccagccctggaggccaggcactgtttctgagcgctttgctggtggtaatttatttctcatgatgcgaatgtacagatgaggaatattgaggccaggggggtttaggtgactttcccaaggtcacagttgggtggtaaagagccctattcaaccccagttcatggtcccagcatcagtggccacatacgacatccgcacctgtgctctaataaatacggctcatgctgttttgtgggattccacctcagactggaatttagaagagggcgtccttgctttgaaaaacactgatttaaaaataaagtggagccaggcgcagtggctcatgcctgtaatcccagcactttgggaggctgaagcgggtggatcacatgaggtcaggagttcgagaccagcctggctaacatggtgaaaccccatctctaccaaaaatacaaaaattagctgggcgtagtgacgggcacctgtagtcccagctactcgggaggctgaggcagaagacttgcttgaatctgggaggtgggggttgcagtgagccgagattgcaccactgcactccagcctgggcgacagagcaagactcagtatcaaaaaaaataaaaaacataaaatagaaagtaaaaagtgggaagtttaagcctctgggtcaccagcctctccccctcacccaggcatcatccgacaagggctcctgctgcatcgtagctgctggcagccaaggccctgtcgtcccagcctggtctggcccccgggaggcccctgacagcctgtttgctgtccggaggcacctgtggggtagccatggaaacagcacattcccaggtaagaatggtccttgcactacacggtgcccccaagctcctaatcctgacaggctctgggtggagggtgcaaaggagctccatgctgccccttcccaccaccaccaccactgcagctgccgccactcagcctttgggaaaatgcatccgctcacaaaagcttcctttcgggatgtccgtggcctgaaagccccccatatggtctcgagtgtcgggcccctagccctgactcccttggggattggggccatgcctcacccactctggactccagctactatattcggccatcagaagggagggaccctgctaagtaattccaggagcacctcctttcctcccctgaccaaggaaaatcggggtggattcgcccgagctcacctatccactgctctccaccaggcctggcctgtgggcttagcagggatcagagaccttgactgtcatcctggctctgccatttaacctcttgcatcctttggtgtgcaagttactccgcttcttttcaacctcggggagaactattttggcagaagtggtgcaaagaataaatgatacaacttatgtcaggtgctcagcaaacagtacctgtgcccgtggacacgggtgttgacggtgagatctcaggcctgtagactcaccttgtagggggaggggacagggagctagctaggaggtcctgcatggggcttgattcatccccaccctctgacagagttcctccacaacatggactacttcaagttccacaacatgcgaccccctttcacctacgccacgctcatccgctgggtaagcagggcagctcggccccaaggaggaggaagacaaagatggggtgggggacctgcctcccaaactcctgtctccctctgagtgccctcagagtgggttcctccattcccaagccccagccccaaggatccccaagccgtgcctcaaatgtgacccctcatgctggcttcaccccaaacctgtccgcaaatccaaacctaaaccaccatccaggccagagcatgccaaattctgaccctaaacctacccctttccagatgtccacctcagccccatacctaaccctctcctggacccataaaatagcctaaagctaaccccatctctgcaccttgccctaaacgtaccccagctcttactctaactccttccccagcctttatgccaacccaaccccatctccttccctggccccaacgtaccccagtatgtcaatacacccccaactgggcaccattcccaacctttccttgtaacacccatttgatccttaacttcatcaccccatcccaactccttcatctcagcctccccaatgccttctcagaaccttcatcctagcgccacacctaaccccaaacctgaacctcacccctacatgataccagatattccccgactgtctctgaactgaaaccctgacctagccccatcctgactgatagcctcactgcaatcatcatcgctgactctgtaatcccattcctgaatccaaactgatcaaattccctgaccctcagcctcactccacaccgaaccccacaactaacctcatccttgccctgagcctaaccacctaaccatgtccctgacacgtaagatactcgataattcaaaccatctctggcttctgacctaaagccaagtcatcccatccctcacccctagaccccccacctgagtccaccccagcctgactcttaacccaccccttccctgacccttaagttggcctggccctttaccccttccaaatccttgaccccacttctgacccttcaccttccccaaccctgaaatgtcacctccacagagaaccccaactccaactccatcccagacctttcacctcacttcagccctagccctgaacaagaccccactcccaacctcagtcctgatcccttacctaatcccagaacaaccatacccacacccatctaaccctgcccaacccgacacttcaccccttttctaaccccatctttgaccccatgcttcaccccacatctagtcctgtccctgattacctgcccctacaattccgcccccatgtcagatggctcggggtaggtcatagcccctctaaaccccaagtttggggaatgtgccccttaccccaccccccaacttccaggccatcctggaggctccagagaagcagcggacactcaatgagatctaccactggttcacacgcatgtttgccttcttcagaaaccatcctgccacctggaaggtgagctcctctgaggtggcggtgactgggatggcctcaagtgccatcgcagctcaaagtgggcaggcctgggtctgggctcataggcacattggggaggaacgggatgtgggttgttggtggtggctgctggcctcagaggttgacgcccacctgctccctgtccccggccttccacagaacgccatccgccacaacctgagtctgcacaagtgctttgtgcgggtggagagcgagaagggggctgtgtggaccgtggatgagctggagttccgcaagaaacggagccagaggcccagcaggtgttccaaccctacacctggcccctgacctcaagatcaaggaaaggaggatggacgaacaggggccaaactggtgggaggcagaggtggtgggggcagggatgataggccctggatgtgcccacagggaccaagaagtgaggtttccactgtcttgcctgccagggcccctgttcccccgctggcagccaccccctcccccatcatatcctttgccccaaggctgctcagaggggccccggtcctggccccagcccccacctccgccccagacacaccccccagtcgagccctgcagccaaacagagccttcacaaccagccacacagagcctgcctcagctgctcgcacagattacttcagggctggaaaagtcacacagacacacaaaatgtcacaatcctgtccctcactcaacacaaaccccaaaacacagagagcctgcctcagtacactcaaacaacctcaaagctgcatcatcacacaatcacacacaagcacagccctgacaacccacacaccccaaggcacgcacccacagccagcctcagggcccacaggggcactgtcaacacaggggtgtgcccagaggcctacacagaagcagcgtcagtaccctcaggatctgaggtcccaacacgtgctcgctcacacacacggcctgttagaattcacctgtgtatctcacgcatatgcacacgcacagccccccagtgggtctcttgagtcccgtgcagacacacacagccacacacactgccttgccaaaaataccccgtgtctcccctgccactcacctcactcccattccctgagccctgatccatgcctcagcttagactgcagaggaactactcatttatttgggatccaaggcccccaacccacagtaccgtccccaataaactgcagccgagctccccacatgctggactatcaccccatataagggttgcggtcagtgggcaggggtctgggtccaaggccgcagcaggaggaactggacagcggaggaagtagctagggcatgtgcttggccactgcctccagcaccccaaatccctgcctgaggctggggagagacctctgccggcggctcctcaggcctcccggacccggcctaggaggccagcgttctcctggcggagggctcggtagtcctcccggatcttctccaggttgctgagggtcttcttgcccagctctgtctcgatctgaggcaatgtgaacacatgccccctcagcacacacagcccctttcccagctcctgctcaccagcccccatcacagccactctgggcccctcccaccaactccaacagcctgctctgtcccatggccaggcctcgtgtggtgttccctctacccaaagcatccttcgccatgtggcaggattccccctacatctttaagctgaagcctctgcccatggccctgggaggcagacaggagggcccttggggtggaagctggggctcacagtaggccacttgcctgtcccaggtcacaggcactaaggggcagggctgggtgtccagccatcggctgtgtgtggctccacagcctctgtcagcataacctgaggaactgtccccccggcccgccttggctccccatcctgcccccaggcctcacctgctcctcgaggtctcgaacctcccgcatgatggtgcctgtgtcctcgatggtctggatgagctggctgcagttctggggacaacaggagcagaaggcttgcacccagtcccacccacccccagcagccccaccccaggcacatgtctcccctcacctcgtgcagagcagctagatacttataggccttccgaacagcatcgtccttcttggcatcctgaccagacacagggacctcaaaggtatcagtgggctgcccttgaccatctccatgccctaagaaggccaccctctcccaccaccccactagcttcatcctccatgaaacaaagccagccctgggtatcagtgcacctccagcctcgcacagggcctgggtctggaccccagccagccaattagcagatgcacaaggcagcagcccagcctcaccccactcacccccgcccaacctgccccacaccttgaacacaagctcatcagtcaccgcaaacgtccggtccagcttcccagatagggagttgatttccttctgaagctccttcgtatcagacaagatctggcagacaccatggcagccatgagcccctgcctggggcaggctggctagcagtggagggtcctcatgtgtaccagacagggactgtgtcactgtgtcaggggtgactgggatggattgtgtgtgactattctgtgttagagtgtgactggacagctctgcctgagggtgtgaggtccctgtgcggccacactatgcctgacagcccacatgacccaccctccatggccctggcagtgtaccttggtgatctcttccttctgcttccggatgttgcccacgatctccaggatgcgctgggtgtaggccagccgggacacatctctgggcagagtctccagctctgacatctaggcagggatatagcaggcactgccccaggaccatccccccaccctcctaagctacccaggtccctcacacaggccttaccagctgcttatagacctcctccttcctgcgggcctcttcagcagccgcccggacactctggtgcagttcttggatctctgccagccgtcgagaagattccagctgccatgagcccacaggcagaagacagtgagcagagcatagggatggccccctagagagggaccgagcctgccctggcccgcccacagcccagggccccactgcttacctctctgcaatcctgcagctttcggaggtggcggtactcagcgaggagtgggacccggtgcttctcccactgacccgccaagtggatgacccgctgggcactattctccaccacaagctggtgggggatgggtacatgtcacacaggctgggccctccaaccccaccccaccccaccctgcccctctccgcccagctacagccccaaccccacctgcagcttggcaaggttggcagtcccatcgggcagcagctccaccgcgcggctcttcaggcgcagggcctgctcacgctctgctgtactgagcttgctgtgccggcactcagactctgcctggccggtggatacccagtcacatgccacagcccccatggagctccacagatgactgtacacccctgtggcccccacaggcctctctaacagctccacgctggtgccaaggaccccgaggaccccctaatcccctgtccatgcagacccgtgggtaccccacagatgcccacagaccctccgaggacccctcaatcccctgcccatgcagacccgcggtgccccatagatgcccacagaccctcaccctggcctgattctcatagccaccctcaagaggcccacagatccctaatggctcccaggaacccttctgccatgtgcagacctctacagagcacctcttgccccatctagtccctcacaccccgaggccctccttctgacctagcccaacgcgcagcccctcctccgccccttacctgcacaaagctgacgcccagggtcttcatgtcggcctcaacctcctcaatgctgcggttcactccttccagctgctcccgaagggactcgagctcctgttcctgagctgcccacgtgacctgggaggcccaggccagtcagggttggggtgtcaggcccagtagacaagcaagggcctgggacacccccctccaaaccactctgctcacctgttcaggccgccgggaggtggctggcacatctgacacctgagtggcctgggcctggggctcctaaggggagtgacgaggggcatcctggctgccagggaaggcccttcctcacgtggcccagcctcagcctcccctgagaactgcccccagtgcggcatgcatgcccactgaagcaccgatggtggccagactgtgactatgtgggtaaaggcaccatctgcaacctcgggccagagtgcttgctcgtggagaaatctccctgaccctgtcacagctcctacccacctgccccatctctcaagcctcaaatgcccatgagaaggatggggggccctcagagtgaacatcttaggacagaagatatgctcaaaggaaactgcctgaggaaagggggtgttgccccaagaacacccccacacctttgcatggttcccacctatccacattttctccagtcaagtccctaataagctaggggacccctctgggtacccatcccacagtggggcgagggcctgtccagtgggaacacaggaacctgtgtggataaaggtgtggtgctgacacaaaaagccaccctccaagcctgccacgcccatccacacatctcatgtcctcaggcgcaccca

SEQ ID NO: 1207 - DNA, 4049 bp, Homo sapiens
cgacatgctgggaacaccaagagtgaaatccagaatttgccctgaatcatgccacgctttctagaggaccagtttaaaaaaaaaaaaatagaaaaaaataaatgtccctagcatttcttccctggccctgtcactcactagctgagaggctttgagcaagctggctcatctctctgagctacctgtctcccctctactaaatggggataatcatagcacctacacaacacagcatgcacagcaggcctcacggagagaatggatctgatgttcatagcacagaaatcagtaaatgctggccagttatcttttgcagttaccaccatgcttcagttaccttgcccatgtttgctgcattcaatccaaccatgcaaagtgactgtcatttcccttagcagagaaggaaacggaggcaaggccacacagctgatgggcggagccgaatttaggagaggaatccaggaaactgtaggtgtggctccctaaatactgacactagctaacacctgtatgatactactttgagccagactcggttctgagcacctttactcttatcccgtaaagtagatgctataattctgttttacaggtgagggtcctgaggcatggtgtagttaaatgcgttggccaaggtcacaaggccagtaagtggcagcgccaggatttgaacccaggcaatctatgccagaatccacactcttaatgctgtaagaaaaaccatgctgcctgccccctttaaatgaagtctcagattatggtggggctcacaggtgggtgagtgggtacctgcctgcctgctcagttacccaggcacatctgcccaccagaccggagctagacctttctgaaccactcacagcctaaggccttaccagaaccagcagaacccacaaatgtcttactgcagccaggggcttctgaccaagcgtatacatacaaggtccaaaaagcattttcccatttccattcccagtcctcccaggaacagggaaatgtatacattttagggagaatctagtgatcctgggccagacttaggtgaccgcaaaaagaatcaggactagctgctgcccttaaagaactcatagcttgatagaggaaacctagggaaatcttctggggccccctggggtataactgattatttctccctgtccctaaatgatcacaggtggtgtggcaaaaaaacaagggacaaaaacttcaagtccagtacccatctggttctgtctctctgctagagccactgctttcttgtgagagcatgggctcagcccctcgcctccacaggactcaaaagtagattacagcgttaacagtagagtgcacaggcttcaaggtcaggcatgggtgaactggaagagccaggtgccatcactgcctcaaccagtttctccacctctggaatcctggtttcctgctctgtcagaaagagaatctgctctaccccccactggcaaagcccttggtccacactatgtcattgcagttctctccactccagcacactgctgatcattcacaccaagctcatttccaccccaggactttgcacttgctgtttcctctacctagaacacccttgttccatatatgcacataactgttattcatcatccaggacttagtttaaatgaaacctcctcagaaaagtcctccctgttccttttcctacaaactctcccccacctccccaccgtatctgcataactcttctttatcatcattcgggactcacctcctcaaaggccctccctttaacagcatgtctgacacagtcattccctcccaatctatccccttactcccttcagcagctaactttgtccctatttatcctatctgcttgcttgcttgttttttcaaactgtctcccataggagcctgtatgaatccttgagggtagggtagatgtctgtcttgttcagggctttacagtggaactcaataaatggaggaataaaaccccagttaaaacagtgcctagcacgtgtttgacctccatcactctttgactgactgactcaatgcaccctcctccctgtcctggagagcaggcctgaggggttcctgggccggaatgcttgtcctccatcccagacacagccctgcgttggcggaggtggcgctggctgacattacctgcgcctcaccggcttcatgcagctcttcagctgcctggcctcagcctccacgggaccctggcactcgggctgtggctccagctgcggcagctgctgctgctggggcagcccttcggcatcagtgggtgtgggagcgggtgcgatccggagcaggactgtgtagttgcggccgtggttgttggcccagaaagtgccctcaggggtctcatagcgcaccacgaagtcgaggcgcgccccatcgcccgcgccctcagcaaagggcagctggaaggcaaagcggtcggtgcggccgccgtcgtcgggcgaggaggcggatgcctggccgggacccaggccgagccccggatccaggatgggatctcctgctcctgttcctcccgctcctgcccacggcgggctgcgcgggacgtagcgcgctgggtggtcgcaaaaggaagcccagccgtcgtgtgaggcccgcacgtgcaccgccttctcgaaggagcggttcagcacgcgtaccaacccgcgcagcaccggcgggcggcccccaggcacccacaccccggcacccccggggaccgctccgggaggcggcagcagcgcctccagctccaccatgacgcgccccaagcgctccagacggcccggcgcgggcggcagcgaaaatgtggggaccaggtaaaaccccccgccagcggggacggggcacagcggtgagggctcggggcaagcctcctcttcctcctccccttcatccccatcctcgccatcgtcgtcctcgtcggccccgccgccgccgccgccatcttgcccggccgccgccgccatcttgcccgccccgggcccgccccacggccggtagcggcgcaactgcgccagcggcagccccaaggcctcgtcggcgaacagcaccctccgcggggccaccgccgcctcgaccgaggtgcggggctcacccgcggccggcgaggggggcgcggaatgccgcagcgggggctccacaggggccgtacgcgccatatcggcggcggcggcggcaccgacggcaccggcggcgggaccggcgggggcagggcctgaaggggcgggcagccaatgggaaggccagcgcggaggggtacggctcacgggggcataggcggtgagatgaagacaagtattgcagagggccaatgggcagccatgcacggatgacgtacagcgaattgagagccggagaagcacgcagccaatggggatgcccgggagtgggcggtgtagggggcgggatgatcgaggaatcaatggagaggccggaatgggggtggtgcgaaatccatgatgaagaaaacagaagcagacagctaatgcggaagtctgagcgagagaggcatgtgggcggtgggaaaagtggaatggctacaggcgatgagggcagccgggaacgaacgcagaggcccaaaaagtgggagatcccgcgggttgcgtaggcggtggaacggtagctagagagagagaacagccaatggagagccacgcgtgggatgacgacaatggctgcagcgagccaatggggaggcttgtgagcgtgcactgcggcttcgaaggggtggtgccaaggtggagctagccaatacgaaggctaaaaggagaccaagaggcgggtgtgtagggagccgagccaatggaggtggaggctgaaggcgggagcgaggacgagagctggcggatagccaatgagggagccagggtgaaggcgtagagacctcaaaggacagtactagtatgggatgagccaatgccgaggctagatagtgcagcgggacggagggaggacttggaggcaagatggggaaaaaagcagagccgacgggggcagtgtaggtggtgtgaagggaggcatgagtagccaataaggaggctggagaggaggacgctgtg

SEQ ID NO: 1208 - DNA, 4055 bp, Homo sapiens
aaaaatagaaaaaaataaatgtccctagcatttcttccctggccctgtcactcactagctgagaggctttgagcaagctggctcatctctctgagctacctgtctcccctctactaaatggggataatcatagcacctacacaacacagcatgcacagcaggcctcacggagagaatggatctgatgttcatagcacagaaatcagtaaatgctggccagttatcttttgcagttaccaccatgcttcagttaccttgcccatgtttgctgcattcaatccaaccatgcaaagtgactgtcatttcccttagcagagaaggaaacggaggcaaggccacacagctgatgggcggagccgaatttaggagaggaatccaggaaactgtaggtgtggctccctaaatactgacactagctaacacctgtatgatactactttgagccagactcggttctgagcacctttactcttatcccgtaaagtagatgctataattctgttttacaggtgagggtcctgaggcatggtgtagttaaatgcgttggccaaggtcacaaggccagtaagtggcagcgccaggatttgaacccaggcaatctatgccagaatccacactcttaatgctgtaagaaaaaccatgctgcctgccccctttaaatgaagtctcagattatggtggggctcacaggtgggtgagtgggtacctgcctgcctgctcagttacccaggcacatctgcccaccagaccggagctagacctttctgaaccactcacagcctaaggccttaccagaaccagcagaacccacaaatgtcttactgcagccaggggcttctgaccaagcgtatacatacaaggtccaaaaagcattttcccatttccattcccagtcctcccaggaacagggaaatgtatacattttagggagaatctagtgatcctgggccagacttaggtgaccgcaaaaagaatcaggactagctgctgcccttaaagaactcatagcttgatagaggaaacctagggaaatcttctggggccccctggggtataactgattatttctccctgtccctaaatgatcacaggtggtgtggcaaaaaaacaagggacaaaaacttcaagtccagtacccatctggttctgtctctctgctagagccactgctttcttgtgagagcatgggctcagcccctcgcctccacaggactcaaaagtagattacagcgttaacagtagagtgcacaggcttcaaggtcaggcatgggtgaactggaagagccaggtgccatcactgcctcaaccagtttctccacctctggaatcctggtttcctgctctgtcagaaagagaatctgctctaccccccactggcaaagcccttggtccacactatgtcattgcagttctctccactccagcacactgctgatcattcacaccaagctcatttccaccccaggactttgcacttgctgtttcctctacctagaacacccttgttccatatatgcacataactgttattcatcatccaggacttagtttaaatgaaacctcctcagaaaagtcctccctgttccttttcctacaaactctcccccacctccccaccgtatctgcataactcttctttatcatcattcgggactcacctcctcaaaggccctccctttaacagcatgtctgacacagtcattccctcccaatctatccccttactcccttcagcagctaactttgtccctatttatcctatctgcttgcttgcttgttttttcaaactgtctcccataggagcctgtatgaatccttgagggtagggtagatgtctgtcttgttcagggctttacagtggaactcaataaatggaggaataaaaccccagttaaaacagtgcctagcacgtgtttgacctccatcactctttgactgactgactcaatgcaccctcctccctgtcctggagagcaggcctgaggggttcctgggccggaatgcttgtcctccatcccagacacagccctgcgttggcggaggtggcgctggctgacattacctgcgcctcaccggcttcatgcagctcttcagctgcctggcctcagcctccacgggaccctggcactcgggctgtggctccagctgcggcagctgctgctgctggggcagcccttcggcatcagtgggtgtgggagcgggtgcgatccggagcaggactgtgtagttgcggccgtggttgttggcccagaaagtgccctcaggggtctcatagcgcaccacgaagtcgaggcgcgccccatcgcccgcgccctcagcaaagggcagctggaaggcaaagcggtcggtgcggccgccgtcgtcgggcgaggaggcggatgcctggccgggacccaggccgagccccggatccaggatgggatctcctgctcctgttcctcccgctcctgcccacggcgggctgcgcgggacgtagcgcgctgggtggtcgcaaaaggaagcccagccgtcgtgtgaggcccgcacgtgcaccgccttctcgaaggagcggttcagcacgcgtaccaacccgcgcagcaccggcgggcggcccccaggcacccacaccccggcacccccggggaccgctccgggaggcggcagcagcgcctccagctccaccatgacgcgccccaagcgctccagacggcccggcgcgggcggcagcgaaaatgtggggaccaggtaaaaccccccgccagcggggacggggcacagcggtgagggctcggggcaagcctcctcttcctcctccccttcatccccatcctcgccatcgtcgtcctcgtcggccccgccgccgccgccgccatcttgcccggccgccgccgccatcttgcccgccccgggcccgccccacggccggtagcggcgcaactgcgccagcggcagccccaaggcctcgtcggcgaacagcaccctccgcggggccaccgccgcctcgaccgaggtgcggggctcacccgcggccggcgaggggggcgcggaatgccgcagcgggggctccacaggggccgtacgcgccatatcggcggcggcggcggcaccgacggcaccggcggcgggaccggcgggggcagggcctgaaggggcgggcagccaatgggaaggccagcgcggaggggtacggctcacgggggcataggcggtgagatgaagacaagtattgcagagggccaatgggcagccatgcacggatgacgtacagcgaattgagagccggagaagcacgcagccaatggggatgcccgggagtgggcggtgtagggggcgggatgatcgaggaatcaatggagaggccggaatgggggtggtgcgaaatccatgatgaagaaaacagaagcagacagctaatgcggaagtctgagcgagagaggcatgtgggcggtgggaaaagtggaatggctacaggcgatgagggcagccgggaacgaacgcagaggcccaaaaagtgggagatcccgcgggttgcgtaggcggtggaacggtagctagagagagagaacagccaatggagagccacgcgtgggatgacgacaatggctgcagcgagccaatggggaggcttgtgagcgtgcactgcggcttcgaaggggtggtgccaaggtggagctagccaatacgaaggctaaaaggagaccaagaggcgggtgtgtagggagccgagccaatggaggtggaggctgaaggcgggagcgaggacgagagctggcggatagccaatgagggagccagggtgaaggcgtagagacctcaaaggacagtactagtatgggatgagccaatgccgaggctagatagtgcagcgggacggagggaggacttggaggcaagatggggaaaaaagcagagccgacgggggcagtgtaggtggtgtgaagggaggcatgagtagccaataaggaggctggagaggaggacgctgtgtagacagagtctgaggtattgggtggccggacagcagaaccatagaacgcaggcagccattaggaaaaatgtgcttctcagggatgggg

SEQ ID NO: 1209 - DNA, 4038 bp, Homo sapiens
tatgctccctctacttaagctaaccctaggtgagtattattatgttttaattatttcccaacatgacaggtaagaaaaacacattatcacattgttgaaatttgcatcttgtgattacttttactattcattggccattcatgcttttttttttttttttttttggttgtctggtcatgtccttactcctaatagggtgttcatcttatttttcccttattgatttgccacagctctttatttggaatggttattaacctttcatcagccattacatatatagcaaatattttccccaattcatcatttgctttttttctatttgtttatggtgttttttgtgatgcttatgatggttttatacagtcaaataggttagtctttttttctgtggcttctgtctctggttttgtgcttagaaagtcctttcctacttgaaaatgagataaatgttcacctatgttggcttctagtctcttttatggcttcattttttccatttactatagaggttaagagtgtgggtactggagccagactgtctgggacaaacccagcgtcaccccaagccctatgtgtgatttttagccaggcacttaacctctccatacctccatttcctcatatgtactgcaatggttataatagtaccttcctcaggagtctttgtttagattaaaatttttaaccacagtaaatacttagcacaaggcctgacacacaataaacccaagatcagcattaggtgttaaaacttatatcttgaatggatctgggcattttagggtatatgatgatggtgacatttcaaactgggcagggaggggttgttgggataatggactgactattcactcaataactttatcttctccctaattatctcagacacatttgttaaaccatactccatggtcctccagtttgaaatgccacattcatcacaaattcagttctctccatatgtgggtccatgtccaagctttctattctgttctcttccccagtatctgttcttataccagggccacactgttttgctgattgttgctttgcaatacaattcaatacccagccatgggtgtccctggcaccttgcccttctttattcttgattatttcaggcagcatcagttgaaccagccagagaccagcaaatgttcttatttgaggcaatcctcctctcgcacacatgcactctggctctccatgcatgtgtccatttctctcaatgtctctcactatctcttgttctctcttgctcgctctttgtgtgtgtctctttgtctctatgtatccctatctctcagccagtcccctggatagaggggcaattgtcaacttgaagccctgcagacacctaatgacttaaccagacagcgtagaagggccctggcccttgtctactccacgcctctccgtgctcagtgtagaagggcaaattgaagaccagagatctcagggcctcaccgaaatgcagcggcagagttgaaatccaagcctagatctcaggactctaggtgggaccctggttctggctctctccccaactgaaggcctcagtttacccctcagcacccagaagggggaaggggaacctgggctaccattcccccttctgccttctcacacgttggaccccaacttcccacaggttggacgatccacgatcacagtgtggggcccagcctcacaagagctgggctaggtgaggccccggactccataggtcaggaggcctagttggccagagcgtggtgatgatggaggcatgtcagtcagtcaggctgtgtgtccccagagctggtgctggtccccgaaaaccttgattgtggggcccctctagagagtctgatgatgggctctgtattggcgaaggctgaggcttttccagctccccccatgaggcccagaccaaaggcacaccagcctcaacctcctcctccccctgttgccatctctggcggagtggccatgtatttgggaacgttgttccagagtggacagggagactgaggccctagggaggctggctctgtttccaggcctggtaggcaagaggccctatgaagcagcaagctgcctgactttcagatggttccaaggagtttggacaccagggacactggcctacacatactgagactttgggaccgtagaccccacagtctgtggttttgagattctaggatcctttaaatctaagaaatgctgttctatgattctgaggtcctggtgttatactatttgaagaccccaggggtcccagtatctgtggagcctgcctggcactctcagagcttcaaacctgggtcctctccacaacccaagaagggccaggtcttcagagctaggggcttgtcatagtggccagatggacatcacctaccacatccaccagcacccatgtcaccccacctgggccaagcctgctgcaggacagggcagccagttctcggaacgaaacctgtggggtggggtatctgccctcttctcttcctccgtggtgtcgatgaagcccggcgcatccggccgccatgacgtcaatggcggaaaaatctgggcaagtcgggggctgtgacaacagggcccagatgcagaccccgatatgaaaacataatctgtgtcccagaaacatcccccattcagcttctgagaaacccagtcagaaagggacgtcccaacagacagtgcaggaagccggctgcccagcccggccctctaggtcctctacccccagacagatcatctccatgtccctgtctgagaatgtatctatgctttgctgagtcaggccatcccacatgtgtttggggagaattcttagctctggccaagtgtccaggcagcttcagaagtgaccacaggccagccacatgggccaggccagagtggtggaaaacatccatttgcaccgaaatcggtattagtttgttctggctgctataacaaagtaccacaactgagtggcttcagcaacagaaattgatcatctcacagttctggaggccagagtccaagatcaaggtgttgccagggttggttccttctgggggccataagggagaagctgctccaggcctctcccccagcttctggtggttgctggcaatctttgttatttcttggcttgaaggagcatcaccccatctctggcttcattcattcactcaccttctcatctcaccagtgctctcccaggcccttgttcggagcctccacagacccacactcctgtttctcacgcagtaatgttctaagcccccaggagactaagaacttaatacctggattctcacactcatctccctcagcaccacagctctgacaaccacccccaggaggtgacagcaaagaaaggaaggagcaactgctcccccagaacccttctatactcccccgggctgctctcagcagctgtgtgcccaactcagtgctgtgaggtggaacggggagatggagacacacacacacacacaccagagagtttataaaatgtgcacacggaaacacttcctaaagaaagaagtggagttctcaagtcactatgggactacggaactcggcatctgagcatccccttctgtataatggggttggctgggcagtcccttccagctctggcttcctctcagaccaggattataggatcctgaaaagccagtgcttccctcagggagtggaaggttctggggctcagcagggggcccggagccattgtggagggctttcaaggtgaggacaatagaagagcaggtcttgcgtggcttggacagggaaagaggagaaggagtgggcatttgaggcagggggtgtagcatgagccaggcttgagggccagaaattggggtgaactctgatgggggctgggtagagaagcttctacaggccccagctcaagagaccccatctctcctcctctctgtcacttgccatgctggatccgtgcatgatcacactcctggactcgcctccttgccctgagatccagacccccgtattcagctgccccctcagctcctccactcacatatttaa

SEQ ID NO: 1210 - DNA, 4025 bp, Homo sapiens
catggtaaaaccccgactctactaaaaatacaaaacttagtgtgctcctgtaattccagctacttgggggctgaggcaggagaatggcttgaacccaggaagtggaggttgcagtgaagcgacatcacgccattgcactccagcctgggcaacagagagagactccgtctcaaaaacaaaacaaaaaaaaacaaaaaacaaaacaaaacaaaacaaaaaaaaacccacaagatattattgttaacttcattagccatgaaaatggtccagtggttaccttgaaaactgaatgtccttatgagttaagagatgtagtcctaagtatttagagctgaaatgacatgatgtctgagatttgctttaaaataatacagcaacaaagaaaaagttgggagagaaaagatgaagaaaagttggcaaaatggtacataggattcactagaatattctctctacatttatgtttgaaaattactacagatataaaaacaaaaacagacagccaggcgtggtggctcacgcctgtaatcacaacactttgggaggccgaggcagatggatcatgaggtcaagagatcgagaccatcctggccaacatggtgaaaccctgtctctactaaaaatacaaaaattagctgggcgtggtggtgcatgcctgtagtcctagctatgtgggaggctgaggcaggagaatcacttgaacccaggaggcagaggttgcagtgagctgagatcgtaccactgtactccagcctgggtgacagagcgagactccatctcaaaaaataataataatgataaaaaaataaaaatgtaaaaagacacagaggtgaagacagaaagagaggacagataaaaaagtggacagaccaggagggggccgacacagaggtggagaaaaagaggggcagacagagatgtggacacagaggaagaggagacagataaagaggcagacagaaggggaggggggccaaatacagaggtggacagagaggaagaggggacagatgtaaaggtggacagaaggggaggggtactgatacctgggtgaacacagaggaagagggaacagaaataggagagcagaatggagggagggaaaaagagaagtggacagagaggaaaaggggacagataaagaaatggacagagggagagggtgacagagaggtggacagagagaaggaggggacagatgcagaggtggacagaggaagaggggacagataagtggacagaggggaagaggggacagatacagagatggatagagaagaagaggggacaaagaggttgacagagaagaagagggggctcggcatggtggctcatgcctgtaatcccagcactttggaaggccaaggtgggtggattgcttcaggtcaggagttcgagaccagcctggtcaacatggcaaaaccccatctctacaaaaaatacaaaaattagccgggcgcacgcacctgtagacccagctactcagatgcctgaggtgggaagattgcttgagcccgggaatttgaggctgccttgagccctgatcatgccattgtagtccagcctgggtgacagagcgagacaccgtctcaaaaaaaaagaagaagagaggacagataaagagatggacagaaggggaggagggacaaatacagaggtggacagagaggaagaagggagagataaggggacagagggaaggggcaacagatacagaggtggacagagaggaagaggagagagattaagaagtaaacagaggcagaggggtgacagatatataggtggacagcaaggaaggggagagatacagaggtggacagagcagaaggggacacagataaaaaggtgcacagagaagaagaggggacagataaagaagtagacagaggagaagggggaacagatagatagacagagcaagagaggaattcagtacagaaacgaggagacagagaggtaagaaagaggagcagcaaaaacacagaactagaataatggggacaggcagaaattgtgcaaaaacctagaaaccagaaaaatgaacatcagtgacaagtgcagaaacagagaaagattagggccgggtgcggtggctcatgcctgtaatcccaacactttgggaggccaaggtgggcagatcacctgaggtcaggaattcgagaccagcctagccaacatggcaaaaccctgtctctactaaaaatataaaaattagccaggtgtggtggtgcaagcctgtaatcccagctacttgggaggctgaggcaggagaatcgcttgaacccgggagatggaggttgcagtgtgctgagatcacgccactgcactccagcctgggtgacagagcaagactccaaatgaatgaatgaattaatgaatgatgaaggcaggtagccaatctggattgctccagttgccaggaatctcaagcacattattcagtctaactactgccctgagaggagagcactattactaccccaaattttagcacaggaaaccaaggctctgaggagggatactgacttgtcccaggttctccttttttctgactccagtgttctttcaggtggggagctaggtaagcacacacagaggggaaacaatggaagggagggacaaagtggggaaggagagcagaggaccagcgggagtgtcagtgagcagcagcccagacagcagggagccaggcatctggctgtacctggggtgggaggcgggatgtccggtggacccagtcctcatcccctggccggtcccggcccgtctgctggcagagctgcagggcatggtgttcgaggagcgaggccacccttccaacaggctgaggcacctgggtagggactggaagcagcaggggactcgcctggaactcccgtggctctggaggcaggaacagagtcagctggccctgccgcatggcaacgctatgaggttcccccccaccttcctcctcacccctccccacagcctcatgctcaccacctctggaactcaattctggcacgaccagcctgctggcatggaaaggcttctggagggccgagccctggtgggagagcaggctcagaatctccagggtgaagtgggatgagggttgccaggggtagggggccaaaaccctgggcacccagacggggacaagagaagatccatgggagtcaggggtctcacctggaggtgctgcagcttgggagtgcgaaggtggggcgggacccaaggcagtgccagctggtcccgaatttggctcccaatggcccggaggagaatagctgagtcacctatgggggatagggaggaagtgaatcagatgtcaatgctgcaaatccaaaagggcataccctaggagaccagcctccactcctgacccccatccagagatacacatctatccagcttgcgttctcacgttcagtcattcaacaaacaccgagcacctactatgtacaggtcgctgttctagacactagggctacttcgtggaacaaactggataaaggtccctgccctcagggagccggcaagctagcagaggagagagatcatgaataggatcctgaataccatccagactgcagccaggtggggatcaggagagggctgcggagaggaggttaacctcaaagaggtaagggagtgaaccatgagggtacctaggggaaaggtaaccaacgatacaaaggtgcagaggcgggagtgtactggggtatgtttgagtagcacccaggaggcccaagtggttagagcgaagtgagagagagggagggcacaggggttgagtcagggaggcccctccccgcaccaacgcaccaccggggtcagctcaacctcagccccctgccccctgccctgtagcccctctctgatgcctaatcctcctgcctagctctcctgaaggcacataccgccacccctacccatcaacctttttaccacctctacctctctcagccctacagcccctagaaggccctcctctcccctcaccgcccccgcccacatcccagacacccagtacctgc

SEQ ID NO: 1211 - DNA, 4065 bp, Homo sapiens
gaatattctctctacatttatgtttgaaaattactacagatataaaaacaaaaacagacagccaggcgtggtggctcacgcctgtaatcacaacactttgggaggccgaggcagatggatcatgaggtcaagagatcgagaccatcctggccaacatggtgaaaccctgtctctactaaaaatacaaaaattagctgggcgtggtggtgcatgcctgtagtcctagctatgtgggaggctgaggcaggagaatcacttgaacccaggaggcagaggttgcagtgagctgagatcgtaccactgtactccagcctgggtgacagagcgagactccatctcaaaaaataataataatgataaaaaaataaaaatgtaaaaagacacagaggtgaagacagaaagagaggacagataaaaaagtggacagaccaggagggggccgacacagaggtggagaaaaagaggggcagacagagatgtggacacagaggaagaggagacagataaagaggcagacagaaggggaggggggccaaatacagaggtggacagagaggaagaggggacagatgtaaaggtggacagaaggggaggggtactgatacctgggtgaacacagaggaagagggaacagaaataggagagcagaatggagggagggaaaaagagaagtggacagagaggaaaaggggacagataaagaaatggacagagggagagggtgacagagaggtggacagagagaaggaggggacagatgcagaggtggacagaggaagaggggacagataagtggacagaggggaagaggggacagatacagagatggatagagaagaagaggggacaaagaggttgacagagaagaagagggggctcggcatggtggctcatgcctgtaatcccagcactttggaaggccaaggtgggtggattgcttcaggtcaggagttcgagaccagcctggtcaacatggcaaaaccccatctctacaaaaaatacaaaaattagccgggcgcacgcacctgtagacccagctactcagatgcctgaggtgggaagattgcttgagcccgggaatttgaggctgccttgagccctgatcatgccattgtagtccagcctgggtgacagagcgagacaccgtctcaaaaaaaaagaagaagagaggacagataaagagatggacagaaggggaggagggacaaatacagaggtggacagagaggaagaagggagagataaggggacagagggaaggggcaacagatacagaggtggacagagaggaagaggagagagattaagaagtaaacagaggcagaggggtgacagatatataggtggacagcaaggaaggggagagatacagaggtggacagagcagaaggggacacagataaaaaggtgcacagagaagaagaggggacagataaagaagtagacagaggagaagggggaacagatagatagacagagcaagagaggaattcagtacagaaacgaggagacagagaggtaagaaagaggagcagcaaaaacacagaactagaataatggggacaggcagaaattgtgcaaaaacctagaaaccagaaaaatgaacatcagtgacaagtgcagaaacagagaaagattagggccgggtgcggtggctcatgcctgtaatcccaacactttgggaggccaaggtgggcagatcacctgaggtcaggaattcgagaccagcctagccaacatggcaaaaccctgtctctactaaaaatataaaaattagccaggtgtggtggtgcaagcctgtaatcccagctacttgggaggctgaggcaggagaatcgcttgaacccgggagatggaggttgcagtgtgctgagatcacgccactgcactccagcctgggtgacagagcaagactccaaatgaatgaatgaattaatgaatgatgaaggcaggtagccaatctggattgctccagttgccaggaatctcaagcacattattcagtctaactactgccctgagaggagagcactattactaccccaaattttagcacaggaaaccaaggctctgaggagggatactgacttgtcccaggttctccttttttctgactccagtgttctttcaggtggggagctaggtaagcacacacagaggggaaacaatggaagggagggacaaagtggggaaggagagcagaggaccagcgggagtgtcagtgagcagcagcccagacagcagggagccaggcatctggctgtacctggggtgggaggcgggatgtccggtggacccagtcctcatcccctggccggtcccggcccgtctgctggcagagctgcagggcatggtgttcgaggagcgaggccacccttccaacaggctgaggcacctgggtagggactggaagcagcaggggactcgcctggaactcccgtggctctggaggcaggaacagagtcagctggccctgccgcatggcaacgctatgaggttcccccccaccttcctcctcacccctccccacagcctcatgctcaccacctctggaactcaattctggcacgaccagcctgctggcatggaaaggcttctggagggccgagccctggtgggagagcaggctcagaatctccagggtgaagtgggatgagggttgccaggggtagggggccaaaaccctgggcacccagacggggacaagagaagatccatgggagtcaggggtctcacctggaggtgctgcagcttgggagtgcgaaggtggggcgggacccaaggcagtgccagctggtcccgaatttggctcccaatggcccggaggagaatagctgagtcacctatgggggatagggaggaagtgaatcagatgtcaatgctgcaaatccaaaagggcataccctaggagaccagcctccactcctgacccccatccagagatacacatctatccagcttgcgttctcacgttcagtcattcaacaaacaccgagcacctactatgtacaggtcgctgttctagacactagggctacttcgtggaacaaactggataaaggtccctgccctcagggagccggcaagctagcagaggagagagatcatgaataggatcctgaataccatccagactgcagccaggtggggatcaggagagggctgcggagaggaggttaacctcaaagaggtaagggagtgaaccatgagggtacctaggggaaaggtaaccaacgatacaaaggtgcagaggcgggagtgtactggggtatgtttgagtagcacccaggaggcccaagtggttagagcgaagtgagagagagggagggcacaggggttgagtcagggaggcccctccccgcaccaacgcaccaccggggtcagctcaacctcagccccctgccccctgccctgtagcccctctctgatgcctaatcctcctgcctagctctcctgaaggcacataccgccacccctacccatcaacctttttaccacctctacctctctcagccctacagcccctagaaggccctcctctcccctcaccgcccccgcccacatcccagacacccagtacctgcaggctggtctgcatcctcagaggcatcggtgggcagacgctcagccaagaagagaagcaggtctcggaggtcaggctcactggggtagaggaagttctgatagccaagctccaagggatagcccaggtcctgagggttggtgggcggctatcaggaagcaggcagggtcctcctgccctgggagacttgggcctaggctgaaaacgctcccactttctcactaaccaccaccctcccaacctcccccagctccccaaggcctctgggccctggggggagtcacagagtgatgatagtcaacgctacagagaacaagaaacaagattaaagctctggcctttctatgactcaaaatccagaggccataaaagaaaagatgggtacttttgaatacatgaaaagaaagaaaatatttaaagaaaatagaataagcaaagtcaaaagttaatgacaagttgggaaaaaatatttggagcccata

SEQ ID NO: 1212 - DNA, 4042 bp, Homo sapiens
tgatacctgggtgaacacagaggaagagggaacagaaataggagagcagaatggagggagggaaaaagagaagtggacagagaggaaaaggggacagataaagaaatggacagagggagagggtgacagagaggtggacagagagaaggaggggacagatgcagaggtggacagaggaagaggggacagataagtggacagaggggaagaggggacagatacagagatggatagagaagaagaggggacaaagaggttgacagagaagaagagggggctcggcatggtggctcatgcctgtaatcccagcactttggaaggccaaggtgggtggattgcttcaggtcaggagttcgagaccagcctggtcaacatggcaaaaccccatctctacaaaaaatacaaaaattagccgggcgcacgcacctgtagacccagctactcagatgcctgaggtgggaagattgcttgagcccgggaatttgaggctgccttgagccctgatcatgccattgtagtccagcctgggtgacagagcgagacaccgtctcaaaaaaaaagaagaagagaggacagataaagagatggacagaaggggaggagggacaaatacagaggtggacagagaggaagaagggagagataaggggacagagggaaggggcaacagatacagaggtggacagagaggaagaggagagagattaagaagtaaacagaggcagaggggtgacagatatataggtggacagcaaggaaggggagagatacagaggtggacagagcagaaggggacacagataaaaaggtgcacagagaagaagaggggacagataaagaagtagacagaggagaagggggaacagatagatagacagagcaagagaggaattcagtacagaaacgaggagacagagaggtaagaaagaggagcagcaaaaacacagaactagaataatggggacaggcagaaattgtgcaaaaacctagaaaccagaaaaatgaacatcagtgacaagtgcagaaacagagaaagattagggccgggtgcggtggctcatgcctgtaatcccaacactttgggaggccaaggtgggcagatcacctgaggtcaggaattcgagaccagcctagccaacatggcaaaaccctgtctctactaaaaatataaaaattagccaggtgtggtggtgcaagcctgtaatcccagctacttgggaggctgaggcaggagaatcgcttgaacccgggagatggaggttgcagtgtgctgagatcacgccactgcactccagcctgggtgacagagcaagactccaaatgaatgaatgaattaatgaatgatgaaggcaggtagccaatctggattgctccagttgccaggaatctcaagcacattattcagtctaactactgccctgagaggagagcactattactaccccaaattttagcacaggaaaccaaggctctgaggagggatactgacttgtcccaggttctccttttttctgactccagtgttctttcaggtggggagctaggtaagcacacacagaggggaaacaatggaagggagggacaaagtggggaaggagagcagaggaccagcgggagtgtcagtgagcagcagcccagacagcagggagccaggcatctggctgtacctggggtgggaggcgggatgtccggtggacccagtcctcatcccctggccggtcccggcccgtctgctggcagagctgcagggcatggtgttcgaggagcgaggccacccttccaacaggctgaggcacctgggtagggactggaagcagcaggggactcgcctggaactcccgtggctctggaggcaggaacagagtcagctggccctgccgcatggcaacgctatgaggttcccccccaccttcctcctcacccctccccacagcctcatgctcaccacctctggaactcaattctggcacgaccagcctgctggcatggaaaggcttctggagggccgagccctggtgggagagcaggctcagaatctccagggtgaagtgggatgagggttgccaggggtagggggccaaaaccctgggcacccagacggggacaagagaagatccatgggagtcaggggtctcacctggaggtgctgcagcttgggagtgcgaaggtggggcgggacccaaggcagtgccagctggtcccgaatttggctcccaatggcccggaggagaatagctgagtcacctatgggggatagggaggaagtgaatcagatgtcaatgctgcaaatccaaaagggcataccctaggagaccagcctccactcctgacccccatccagagatacacatctatccagcttgcgttctcacgttcagtcattcaacaaacaccgagcacctactatgtacaggtcgctgttctagacactagggctacttcgtggaacaaactggataaaggtccctgccctcagggagccggcaagctagcagaggagagagatcatgaataggatcctgaataccatccagactgcagccaggtggggatcaggagagggctgcggagaggaggttaacctcaaagaggtaagggagtgaaccatgagggtacctaggggaaaggtaaccaacgatacaaaggtgcagaggcgggagtgtactggggtatgtttgagtagcacccaggaggcccaagtggttagagcgaagtgagagagagggagggcacaggggttgagtcagggaggcccctccccgcaccaacgcaccaccggggtcagctcaacctcagccccctgccccctgccctgtagcccctctctgatgcctaatcctcctgcctagctctcctgaaggcacataccgccacccctacccatcaacctttttaccacctctacctctctcagccctacagcccctagaaggccctcctctcccctcaccgcccccgcccacatcccagacacccagtacctgcaggctggtctgcatcctcagaggcatcggtgggcagacgctcagccaagaagagaagcaggtctcggaggtcaggctcactggggtagaggaagttctgatagccaagctccaagggatagcccaggtcctgagggttggtgggcggctatcaggaagcaggcagggtcctcctgccctgggagacttgggcctaggctgaaaacgctcccactttctcactaaccaccaccctcccaacctcccccagctccccaaggcctctgggccctggggggagtcacagagtgatgatagtcaacgctacagagaacaagaaacaagattaaagctctggcctttctatgactcaaaatccagaggccataaaagaaaagatgggtacttttgaatacatgaaaagaaagaaaatatttaaagaaaatagaataagcaaagtcaaaagttaatgacaagttgggaaaaaatatttggagcccatatcataggtaaagagcaaatctacctattatagaaagagtgcctaaaaataaacaggacaaaaagaccagaagcacaatagctcagaacaaaaggactcatgagggttctgatggggactgaggaaacaggccaggagagaaagaaagcctttttcctttttttttttttttttttgagacagggtctcgctctgtcgctcaggctggagtgcagtagcgtgatcttggctcactggaacctctgcctcctgggctcaagtgatcctcccacgcagcctcccgagtagctgggattacaggtgcatgccaccacacccggctaatttttgtattttcagtgtagacagggctacaccatgttggccaggctggtctcaaactcctgggctcaagcaatctgcccacctcagccacccaaagtgctgggattacaggtgggaatcaccacacccggcctaggaaagcctttttcttccagagttgccactgctttggaactgcatagactctgaaagcagacttcctggattcaaacccaagctttgcctcttaccaactatacgacctcaggcagat

SEQ ID NO: 1213 - DNA, 1299 bp, Homo sapiens
acgcccgggaacccccgacccctctgagcccggggtactgcgcccgggtctccacgcccagagatgctccccggtctccaccgtcgggcaagccccaagcgcagcagcgcagagtcctggggtcaccagagctcgtactaggacatcgtctccccatttaacaccgcctccggtcccatctgagttgcaagtggtggggatgtggggctccggatcaaagtccccgaaaccgagcacttcccgaagcctccttggcctcgaaacaaaacaataacgcccaactccatcatattccagaactcccaccacctgcatacagacattcagctgcacaagccccctccatgctacagtcaacaggatctccaggccacggctcaagcccaggtactcacatcagtggttctatcaacactcaggacagacccatagaagaggcccaagcaggccctggaagtgcatgtggaggccaccaggcaaggaattctggagtcccaggtactcataactctgggtggcatggcccctttgcaccatggactgtttgcccttagaaagggatggatctgagctgggcgcagtggctcatgcctgtaatcccagcactttgggaggccaaggtgggcagctcacctcaggtcaggttggtctcaaactcctgacctcaggcgatccacctcagcctctcaaagtgctggaattataggtgtgagccactgtgcccagcccaaaatcattctttttggaattttgaagcatataattccaaaaggtatgaaggtaatcacttagattgctctaataagggaatgggaacagttaagtcctatacaaataagacaaagataagatactacaaaaaggggatgagcccaagaaaaaaatcaaagtcccagagagagaacagccattgattctaaatacacaagtctatggccccaacccaaacttgtttcactaagaacaacctgtggtttcgagaatctggtcatcccccacagtgaatacatgaacacattgtaatgtttgaaatgtttatttttcttgttgatttcttactgttagaagagctaagtgatttggcccaaagtggctaagtgattcggccagtttgtacacagggatataagtttgctgacaccaagctcatactttacaaatgtaatatcttcataaaacaaaaatactgggccgggcgcggtggctcacgcctgtaatcccagcattttgggaggccgaggcgggcggatcatgagatcaggagatcgagaccatcctggctagcagggtgaagccccg

SEQ ID NO: 1214 - DNA, 917 bp, Mus musculus
caaaatggcgtgctaccctgtccaaccttgtctgtagacagagtcaattgaacactgtctttgggacttccgtgcaactgaggtgggcgggcttgaagcacaaagctttcagggagaaccaaactttatgcccaagctgctctctgccacccacagggtaaatgaatctcatacaggaaaggcaagagacatgtgacactgttgtctgatggtcacaagtcaagctttttaaaaagcagcctgatattgtgagctaacatggctttctgtaattgaatgcaatgtattttctatgcttgtctgggtaaagttgaccttggtttgatttagctcaagcaatatttcaacagtgcactggggctctgagtcccctgactactgtttgactagagccaggctctgccctggatggcaaccaacagcccaggctctggggcacagccgggctttgacaggtctggggaaatgttcaccggagatgaaaggtttcaaactatgaaactctaaaatctcaagtcaaaacttttgacaagcacacacaggacatgaattacaatcacccgaagatttttacaggcttctcaattttaatgacatgctgacacgtgtcatcagatctcacaacaagatgacacatgggtgtcaggtatggcgcagaagactagagtcggggtgtaaccaatgagcattgtctgttggacacaggcgaattcggcaaacggacagtgctggaggcagaagggtttaaagaaggcaggaaagcccatgtttaacagaatggggtgacgaagagggatgggaaggtctaactcacccgggggtgggggcaccaggggggcccacggacacagaaaaccacgcaggtcaggcacctacaaagaccgaaggaaaaagggaccacgcagaaatcactcacg

SEQ ID NO: 1215 - DNA, 416 bp, Homo sapiens
gacctcagcagtccctgctgaggaagctgccgggctccctgtgtaccactggccttcatgaacaaagctgacaccatcatgctccttcggacatattctgctagcataaagggacccccatctccccaaccgaattaggcagagctggccttccttctagcggagttcctaggagtgagttggtgccaccccttgtgaggcttgatccaaaaaccagaacctctccagaccagggatccatgtcctctaacacaagaggggcagacctaacctctaaaatccctcccactctaaccttcagcatccacagctcaaaacaaccaggatgcctcagaaacagcactcactggggcgagcaggattaggcttcagaaaaaccaggtagatccagtttcttctgtcagaaaatgtttttt

SEQ ID NO: 1216 - DNA, 3591 bp, Homo sapiens
agcggagtgattctcctgcctcagcctcctgagtagctgggattacaggcgccagccaccatgcccggctagtttttgtgtttttagtagagacgggatttcaccatgttgcccaggctggtctcaaactcctgatctcaggctcaagctaccttcttgatgaaaaattctggacgtgttctgaaaatcacagtcatccctaacttcagtggaaaagattcatattgtccagctgaacaaggattgatacttaaaaccagggatttcctaaaatgaaaatgtttctgtggataaaactgattacatgcagagactggaatggagttaattctgggtagatatgggattcaagagattggtcttcatgaggcatttatcaaggatctgcaagggatttagaggtgacggaagcacagtccttcctgggcagttgcctctagcctggtgggaggtgttcctcacacccaggactctcatccatggcaaaataaaaagtgagatatcgactgggcatggtggctcacgcctgtaatcccagcactttgggaggtcgaggcgggtggatcacctaggccaggagttcgagaccagcctggccaacatgacgaaaccccatttctactaaaaatacaaaaattagccatgtgtggtggaatgcacctgaagtctcagctactcgggaggctgaggcacaataattgcttggacccaggagaaggaggctgcagtgagccgaggtcgtgtcactgtactccagcctgggtgacagagtgagactccatctcaaaaaaaaaaaaaaagtggatatcacatcagagaagctcctggccaggtggccttgaggaacagggatgagttcagcacttagagatggagttggctttccccgttggagggaaaggcatgagaagggacataggtaagaggaagtagagtagtgcaggggccattgagtagtagtccttccaagacaggacttcatcatagaaccactttctctgaggaagctctgcttgggggaggttttaattcatgaggaaggcaaattcaatggctctcaggtgaggtgggaaacagacacctaccaacactccaaagagaacatgtacctctataaaagggcacagtctagtgaacaaagtccacagctctgggtttgatttctagcactgtcacttaatactgtgtgaccttagacattcacttaactctctcagcctcaggatacaatctgtaaaaacaggagaatgcttgttccctgtgccttataggattgatatgagcatcaggagagacagtgggcacaaaatagcactgtcaactacttctttctagtcagttatctggtcatgtttgtgaagctccccaggactgggaacatagcatatgatttttttaaagttacttgatgaatgaatgaataaatgaatgagtaaatgaatgaataatatctaaaggcctccaactaaataataatcaacttcctaaccgtactgaaagcctttaattgactttggggctgtttggcctggaggaggctctgagttagtggtgatcagttggtgtcatggtagagaagaaagcctgtgaaggtggagtcattgtcattatcagcatagagtccattacgctctccttccccatacacctggagccagacttggtcgcccacctccagatgcaggagcacagagccggaggcctggtccacattattttcctggtactgatcataggtgaagagcatagccttgtccttcttgaagaggctgaccttcacatccttcatatagactgtgatgtggtaggcaaagtagtacagcccaggaatgttgcagtggaatttaccagtggagccatcatagtggttttgctgattgtagaagatcttggtaaagcgaatgggcatgttggggatagtaacgtaagtctccaatcccacactgaatgctgagcggtatacataggcaccttctccaggttctcctttcctgccttggattcccggaaagcctcggggaccttcagccccgggtactccggtttcaccgatgtctcccttaggaccaataagacctaaggaatgagaagacctcagtgactacaaagaacagaactcctgcctaggatgtctctcctcctctattctgcctacccatcattcaaggcctagctgaagctctgcctcctccttgaagccttcattcttcatcaggtccacggggtgccatctctgccatcacggcctggggccccattatggcccggatgccctgggatgcccgccatccaacctgtgcaggcccccttgggcaggggaagcaggactccgggcccttgagtcgtggtttcctggtcatgaccgggcagagctaatagcagtagaacagctcccagcaacagcatcctgagccctggaatccacatgtgcactgtcagccatggagagacagaccccacacacacacccagttgggacctacaaaggactccgtccatctcagcagagtctacttctaggagctgctttctaagtattcaacttttccaggaagacttttctgaatattgcagcccaccttgatctctttctgccctgaaatctgtaatacttagcattattccctgtgtgtagtctcctttcctcaccaagattatgaattcagtgattgcacagatgacactcctctaattttcccatgtctgagcacaggaccaagcacagggaaagctccaagagtcgacttgccaagaatccatccttgggtttcccaagtacgatgacacagattgctccattcaatgctaaccagcttctctcctctggctcctttcttctttttctttccccccttctctctcattttctgtgtctattcctccttcttactctctcattctctttcttcctctacccctctcctggggcacatgtttgactattgggtatattacatttgcacacatgcacacacacaaacacacacagagaaaaagagagagagagggagggagagactcaccttgtgttaagcagacaacgagagacacatcatcccatgaacatatcccctggccctttgtttgcctgagccatctttagctgcccctcctcccctgtctaatctctattcagccttcaggacccagtttggatgtcatctgtttcaagaagtcctccttgttctccatctcactccttggctggttctttcccctctgtgtttctccagtgccctggtaatatggtttgggtctgtgtccccacccaaatagcacgtcgacatgtgttggagaaggggcctggtaggaggtgactgaatcatggaggcagacttatcccttgctgttctcatgatagtaggtgaattctcacaagatctggttgaaagtgtgtagcacttcccctatattctctctctctctctttctctctctctctcctgctgctgtgtgatgtgcttgcttccccttcgctctttcttccaccatgattgtaagttttctgaggcctccccagccatgcttcctgtacagcctgtggaactgtgagtcaattaaacctcttttctttataaaaaaaaaaaaaaa

SEQ ID NO: 1217 - DNA, 932 bp, Homo sapiens
  misc_feature (885)..(927): n is a, c, g, or t
cagcttctcttgcagctcgtgcagcttctggcgcgcgccctcttggagctctgcgcgcagcggctccaccttctggcggtagagctccatctcctcctgccacttcttctggaagtcgtccagatccaaatggcaaaccttcttcatccaccaggacccaacccacaggctacttattgctggaaacctacgttgttccttggattgaagtaatctctccctcttctggtgcgcccacagcacttgcaccaacagtgggtacccaacagactagcgtgcctgccgaagaaggggtcctctgacaatcaggggacaatggggaattatgctctccagactttctacacacacaagtcacacaggaaggaaggtaaagagaaactagagaaaataatttttgaagaaaaacatttcaggaagtattgaaagtacacggtaactcagcctggggcaggggtggagggcagcagcactgtttgctgcagctatgctccttcctcagtgccctgcacacccgggacttgctcggtgagcatctctcgtgtcagtgacagctagtgtgagtactcttatgttcagctgcccctgactacctcttgactttggggacaagttacttaatctctgtgcctccgctgtttcactggtaaatgggaataagagttggttattctagggttgtagggttgttgtaaggattaaatgaatccgtatgtgaacagcatttggtgcctggcacatgtgagctcagccgggcgcggtggctcatgcctgtaatcccagcactttgggaggccaaggcgtgcggatcacgaggtcaggagatcgagaccatcctggctaacacggtgaaaccctgtctctactaaaaatacaaaaaattancggggcgtgntggngggacatgtagtcccngctactcgggnngctga

SEQ ID NO: 1218 - DNA, 2070 bp, Homo sapiens
aggaccagtgagcagcaacagggccggggctgggcttatcagcctcccagcccagaccctggctgcagacataaataggccctgcaagagctggctgcttagagactgcgagaaggaggtgcgtcctgctgcctgccccggtcactctggctccccagctcaaggttcaggccttgccccaggccgggcctctgggtacctgaggtcttctcccgctctgtgcccttctcctcacctggctgcaatgagtgggggagcacggggcttctgcatgctgaaggcaccccactcagccaggcccttcttctcctccaggtcccccacggcccttcaggatgaaagctgcggtgctgaccttggccgtgctcttcctgacgggtaggtgtcccctaacctagggagccaaccatcggggggctttctccctaaatccccgtggcccaccctcctgggcagaggcagcaggtttctcactggccccctctcccccacctccaagcttggcctttcggctcagatctcagcccacagctggcctgatctgggtctcccctcccaccctcagggagccaggctcggcatttctggcagcaagatgaacccccccagagcccctgggatcgagtgaaggacctggccactgtgtacgtggatgtgctcaaagacagcggcagagactatgtgtcccagtttgaaggctccgccttgggaaaacagctaaagtaaggacccagcctggggttgagggcaggggtagggggcagaggcctgtgggatgatgttgaagccagactggccgagtcctcacctaatatctgatgagctgggccccacagatggtctggatggagaaactggaatgggatctccaggcagggtcacagcccatgtcccctgcaaaggacagaccagggctgcccgatgcgtgatcacagagccacattgtgcctgcaagtgtagcaagcccctttcccttcttcaccacctcctctgctcctgcccagcaagactgtgggctgtcttcggagaggagaatgcgctggaggcatagaagcgaggtccttcaagggcccactttggagaccaacgtaactgggcactagtcccagctctgtctcctttttagctcctctctgtgcctcggtccagctgcacaacggggcatggcctggcggggcaggggtgttggttgagagtgtactggaaatgctaggccactgcacctccgcggacaggtgtcacccagggctcacccctgataggctggggcgctgggaggccagccctcaacccttctgtctcaccctccagcctaaagctccttgacaactgggacagcgtgacctccaccttcagcaagctgcgcgaacagctcggccctgtgacccaggagttctgggataacctggaaaaggagacagagggcctgaggcaggagatgagcaaggatctggaggaggtgaaggccaaggtgcagccctacctggacgacttccagaagaagtggcaggaggagatggagctctaccgccagaaggtggagccgctgcgcgcagagctccaagagggcgcgcgccagaagctgcacgagctgcaagagaagctgagcccactgggcgaggagatgcgcgaccgcgcgcgcgcccatgtggacgcgctgcgcacgcatctggccccctacagcgacgagctgcgccagcgcttggccgcgcgccttgaggctctcaaggagaacggcggcgccagactggccgagtaccacgccaaggccaccgagcatctgagcacgctcagcgagaaggccaagcccgcgctcgaggacctccgccaaggcctgctgcccgtgctggagagcttcaaggtcagcttcctgagcgctctcgaggagtacactaagaagctcaacacccagtgaggcgcccgccgccgccccccttcccggtgctcagaataaacgtttccaaagtgggaagcagcttctttcttttgggagaatagaggggggtgcggggacatccgggggagcccgggtggggcctttggccctggagcagggacttcctgccggat

SEQ ID NO: 1219 - DNA, 623 bp, Homo sapiens
cagcttctcttgcagctcgtgcagcttctggcgcgcgccctcttggagctctgcgcgcagcggctccaccttctggcggtagagctccatctcctcctgccacttcttctggaagtcgtccagatccaaatggcaaaccttcttcatccaccaggacccaacccacaggctacttattgctggaaacctacgttgttccttggattgaagtaatctctccctcttctggtgcgcccacagcacttgcaccaacagtgggtacccaacagactagcgtgcctgccgaagaaggggtcctctgacaatcaggggacaatggggaattatgctctccagactttctacacacacaagtcacacaggaaggaaggtaaagagaaactagagaaaataatttttgaagaaaaacatttcaggaagtattgaaagtacacggtaactcagcctggggcaggggtggagggcagcagcactgtttgctgcagctatgctccttcctcagtgccctgcacacccgggacttgctcggtgagcatctctcgtgtcagtgacagctagtgtgagtactcttatgttcagctgcccctgactacctcttgactttggggacaagttacttaatc

SEQ ID NO: 1220 - DNA, 623 bp, Macaca mulatta
cagtttctcgtgcagctcgtgcagcttctggcgcgtgccctcgtggagctccgcgcgcagcggctccaccttctggcggtagagctccatctcctcctgccacttcttctggaagtcgtccagatccaaatggcaaatcttcttcatccgccaggacccaacccacaagctacttattgctggaaacctacctcattccttggattgaactaatctttccctcctctggtgtgcccacagcacttgcaccaacagtgggtactcaacagactagcatgcctgctgaagaaggggtcctctgacaatcaggggacaatggggaattatgctctccagactttctatacattgaagtcacacaggaaggaaggtaaagagaaactagagaaaataatttttgaagaaaaacatttcaagaagtattgaaagtacacggtgacacaggctggggcaggggtggagggcagaagcactgtttgctgtagctgtgctccttcctcagtgccctgcacacccgggacttgctcagtgagcctctctcttgtcagtgacagctagtgtgagtactcttatgttcaggtgccactcaatacctcttgactttggggacaaattacttaatc

SEQ ID NO: 1221 - DNA, 3175 bp, Homo sapiens
  misc_feature (2)..(326): n is a, c, g, or t
cngcnnaaagatttcttcacagggtcctttaaactgtcnntttntaagaggtccttccactacaggtaaagggaaattccctctaccctagggcccctcaggancccttcctctctcacacgtttcttcgactgctnnngatttaagcattcagctggccacgcaacgcaagaagcaataagaacacaaaaaccctaccctgttcntcctctatccgtggcctttgccaccacctccacaacctagttcagattcctcttcttttctcaagggaacgtctaaagctctcaagtccgttttggcagggcgattttgtaagtctgaancatttcagtgtgtctctcgatctcaggcagctcaaaagaaaagatctgctggctgcgtgaaggtgcattagaaacctgctgctaccttgcagcctgggctgagcatatgctccggaacttgcttctcttccaacatcctgcacctcagggttgcacgctctggttcccaagcccccggccgctggcttatgcaaatcacttaggtacatgcaaaagtatcccttctcccggagcgccattggcccggggaggtctcgagctcattactatgcagagaggagagccgccattggccaagaggaggaccagaggggcgtgtttctcgggcaaattggatctcctaaattggatgacctgggctgaaagacaacttaaagacccccagaaaactctggttttatagataagaaatctgaggctcgagagagagtgtgttctgcccaacatcatcacggaacagctcctgggctcctggctcctaatctgtcatcgctgtctggaacagcgatgactcgatcgcgagatcaggaaggtggccgagtgtgtcgccgcggccatcaggcacttctccttcctgcccttgtatgaagaaggatgtgtttgcttccccttgtgccatgattgtaaatttcctgaggcctcctcagccctgcagaactggggttatagccatgtgactgatcttcgtccaagaatatgtaaagaaaaagtgttgagttggcttttagggctagagcaatgtatcttaggctcacttaaggaagctgtagagatgagcccaaggagggaaaccagaagagccccccaggctcaccagttgtttgttggctccctacaaacatgtcattcaagtggctaatcttacaacagcacaaattcatctaaccagaaagagaagaggaggctccaaaggcacttgactactgagcatcaccctggacgtgtacaagtctgcgtccttattgttttcttcattgggccgaactttctggtcctcatccaacagctcttctatcacgtgttcgaaagtgtcagccaatgatgtcaagcatcttgaacctgccttgggcccattcacgctctccagagtcccatgggtccgcacacctggagatactctattatagcaaagaagaaagataatttcattgagccatcctgttttacagtattgaattattaccacaaggtaccaaccatatatgcatacttaatagggtattttgtcaaaactatgcatgaaggtcatttgtttgagatgtcagaacattttcccgtgagaagatctcattgggcattgaaacagaaccacatgctcttcagaccagcaaccgcgactaccaaatactcctctgtcaactctacttgagtaagaacgctttcaattaaggcctaagtgtcaacatgcctttaaaaaaaatcgtggtgacacaaaatctttctttttagcacccaacagaatcccttcaaagcctcgtggtctgacaccctatgctacgtgacttgtgacccatccatttgtcatgttcttcgggaatgtggctaaggggctaagatgtgacttgaaaagaaaggtagaacaagatcatctcaaatttattatcaaggaatagttcagaaaacgacttcagaccacagagacagcagaacagatggtccggcatggatagagcatcagacactcacagactgtgccaacaagagccatcgagtcaaaacagccaaaggaaggagggtcatggaatgggttctctcacaccaaactgatgcccagaggccctcagcatgaataacaaaggcaaccagacccacaagccatactgagtggatacaaaacctatacctaggctgacatcccaaatgtgtgtggcaagttagatgatgatggcacaaaagacagaacaccttgcttctggccattgtcagctcttggaagagagcacacttttagaggagcagctgcaaggagcctgagaacaaaactggaaatgtctgttatgaaagccttcacaggaaattctgcaagtggcaacgtgggtccattccgtgtgtgtcactagagctggcgcaagcccatggccatggtgaggcagcgtttccactggaactaatctgatacctgcaccaactcttgcaactgtgcagtgttcccactgcaaactacggatggggtaaaagactgctcacctcctatttctcatctaatctcacacactctgtttgatgaggctatggagaaacaggtcttctcatacactaaaggtgggagtacaaacaattcaagccctgtgcaggacaattaggcaatacctatcaaaattatacatgatttttcctgctgacccagcaattccacttttgggaataattgacagatataggtgcatatgtacaaaatgatggaaagctctctggtatatattagtaagtgataaaacaaggtgtgtgtatatatggctactaccttttgttttaaaaatgggggaaaatggtggagcttgcggtgagccgagatcgtgccactgcactccagcctgggcgacagagcgagactccgtctcaaaaaaaaaacagggtggggtgggggggaaataatagtacatactcatatttacctgtatctatataaaacacactatcaaggattcacaagaaactaatacaaatgatccccttatagatggtatgtattgggggatactgaggtgagcagggtataagtggggcaagacttttcagtgtaaacttcttttaaattttattttgatttttgaataatgtaaattaactgtcaaataattaaattaaaaataaccaatttattaacaaaaaaaaaaaaaaaaaaaata

SEQ ID NO: 1222 - DNA, 454 bp, Homo sapiens
caactctgccggccgcgggacccgggtgagggtctgggcctgggctgggctgggtgacgccaggaggccggctactgcgcggcgcccgagagtccacatgctgctccgggtctgccgcccgctccgccctccagcgctgggtgctgcggcgacccctggtggccactggccgcaggcactcttctgtgggggagcagctagaggttagacctcaggaagaacttcccagcttagcactattcgtgcatttaacaaaaatggagagcctgctttgtgcaaagcacggagtgcaaccaggacccctgacccaagggagactgcagcctggtggcccgccgcttctaaaattctaaacaggaggaacttgggagctgctgtcttgctgggaagtgggtgcatgcacaaattgaggctgcttggccgccggtatgggtttacagcagttgggtatgtg

SEQ ID NO: 1223 - DNA, 570 bp, Homo sapiens
tgtgatctctcagcagaatagatttattatttgtattgcttgcagaataaagcctatccttgaaagctctgaatcatgggcagtgagctcagtggtatctggaggacagggcactggccactgcagtcaccatcttctgccaggaagcctgcacctcaggggtgaattctttgccgaaatggattgccaaaacggtcaccagcacatttcccaggagcttgaagttctcaggatccacatgcagcttgtcacagtgcagttcactcagctgggcaaaggtgcccttgagatcatccaggtgctttgtggcatctcccaaggaagtcagcaccttcttgccatgtgccttgactttggggttgcccatgatggcagaggcagaggacaggttgccaaagctgtcaaagaacctctgggtccatgggtagacaaccaggagccttcccagggtttctcctccagcatcttccacattcaccttgccccacaggcttgtgatagtagccttgtcctcctctgtgaaatgacccatggcgtctggactaggagcttattgataacctcagacgt

SEQ ID NO: 1224 - DNA, 789 bp, homo sapiens
  misc_feature (9)..(30): n is a, c, g, or t
taaacgggnaaagatgccttnctttttaancctaattgaattttaaatgtccttttgacacaaaaaggtatatacatgacacagctacacaaccttttttcaactggacaacaagtgtcaaaaccctgtggatgtatagggtaaaacaagattggtcaggaaaagagaattgttcctataactggtaatctgacacaatgtcctattgccattaaaaaaaaaaggtccattttcagtttattcaagtttattttcatggtgttttatccctcttgataaaaaaaaattcagacttttgtaatttgtgtatgctgatcttcatcaaaaggttcattctctggatcagagtcagtggtgtcagaatatctataatgatcaggttcattgtcactaacatctgttgttacagaagtttaacttgctagcctccggatttgacggctcctctactgcctttgagaagtacagtttcaccttaaattttggagaaaacgttcacgttgactttgtctttattttcttacggcaagacaattttttgttataagtaagttcctatacttcccttgcatttattttacaccctcctatatctgtcaatctttatctatttttttgtttaacaataaacccactaatttccctactttttcttccaacgttatccacctatcacctggatcataaataatgtttttcttccccataagttcaaaactttttccccctctttttttccacccctctttttgattcttcgcaataaacctttatttgttttctccccac

SEQ ID NO: 1225 - DNA, 467 bp, homo sapiens
aagaaatggcatatttgaagaaatcatatggctagacaaaacaaactagatagattgtgaagctagatagactaaacctcagtcttgattactaattacaagctgaatgtataaatcttttccttcagaggcataaaggtaagagttatgaatcaaatggaaggaccaaaatgcttcccaatgaagtattttcttggtgaagttattgcaatctaaggtctgaaaatcagctgtacaggaactttatcagtaacctaaaagatgatcaatcagcctcagtgactaacgacactgagaagagaccaacgtaaaaactagcacaccagattaatttaccacaaagatattctcaccataatcagaaaacctgccctctattcagagtattcactcttttttggtatgagtactaatctggctgggtcgaattagtgcttagttgaatacagaattaaaataatgtgaag

SEQ ID NO: 1226 - DNA, 501 bp, Homo sapiens
gcccatcaatgggagaaggtctgttatgggaagactgtattgaattaaaaggttaatatcaggctgagctcagtggctcatacctgtaatcccagcactttgggaggttgatgctattactatctctactttactcaggcacagagcagctaagccatttgtccaggttcacagagctagcaggtggccatgcttacacccacagcacctgatactgtctgaaccattccctaaagtatttctacagaagagtactaataagatttttaaatcctgcaggatttttcttattattcttttcaaatattgtgtaatctaataccatgccatccttgatatctaactcattttagagataaaaatgcttaccctaaataccatcatataatctatatttctataaccccaacagcaatattgcaggttagaatccaagtgtgcagaatatttgtgaagatcagtgtagataatactgaaatgacagtgatgaggaagaaggta

SEQ ID NO: 1227 - DNA, 17 bp, Artificial Sequence
  Primer sequence
ggtccaaaatcggcagt

SEQ ID NO: 1228 - DNA, 20 bp, Artificial Sequence
  Primer sequence
gtcctcaaatccctaccaga

SEQ ID NO: 1229 - DNA, 21 bp, Artificial Sequence
  Primer sequence
acacggtcgtgaagctaggta

SEQ ID NO: 1230 - DNA, 21 bp, Artificial Sequence
  Primer sequence
cagttggagtaggccattccc

SEQ ID NO: 1231 - DNA, 18 bp, Artificial Sequence
  Primer sequence
agatgagtccaggtgctt

SEQ ID NO: 1232 - DNA, 19 bp, Artificial Sequence
  Primer sequence
caagtccagagtagccaac

SEQ ID NO: 1233 - DNA, 21 bp, Artificial Sequence
  Primer sequence
tgggctatttttccttactgg

SEQ ID NO: 1234 - DNA, 19 bp, Artificial Sequence
  Primer sequence
gagtccctttgctgtgctg

SEQ ID NO: 1235 - DNA, 21 bp, Artificial Sequence
  Primer sequence
gcgataaaggaagacacatgc

SEQ ID NO: 1236 - DNA, 20 bp, Artificial Sequence
  Primer sequence
ccactccttactggctgctc

SEQ ID NO: 1237 - DNA, 21 bp, Artificial Sequence
  Primer sequence
atgaagtccatggtgacagac

SEQ ID NO: 1238 - DNA, 20 bp, Artificial Sequence
  Primer sequence
acgctctcgcatacacaatg

SEQ ID NO: 1239 - DNA, 20 bp, Artificial Sequence
  Primer sequence
gttggggatgaagatgtcgt

SEQ ID NO: 1240 - DNA, 20 bp, Artificial Sequence
  Primer sequence
gaggcacaagggaaaatgac

SEQ ID NO: 1241 - DNA, 20 bp, Artificial Sequence
  Primer sequence
tggacttgctacccaaaagg

SEQ ID NO: 1242 - DNA, 20 bp, Artificial Sequence
  Primer sequence
cgatgttgcccagttatcag

SEQ ID NO: 1243 - DNA, 22 bp, Artificial Sequence
  Primer sequence
caactgacctcataagcagcac

SEQ ID NO: 1244 - DNA, 20 bp, Artificial Sequence
  Primer sequence
aggctgctttctgcttcaca

SEQ ID NO: 1245 - DNA, 20 bp, Artificial Sequence
  Primer sequence
atactgaagtgcccggagtg

SEQ ID NO: 1246 - DNA, 21 bp, Artificial Sequence
  Primer sequence
caggggacagacatcagtgag

SEQ ID NO: 1247 - DNA, 53 bp, Artificial Sequence
  Primer sequence
taatacgactcactatagggagacccatcggggccacggatacctgtgtgtcc

SEQ ID NO: 1248 - DNA, 30 bp, Artificial Sequence
  Primer sequence
taataggtgaggtttcaatgatttacatcg

SEQ ID NO: 1249 - DNA, 55 bp, Artificial Sequence
  Primer sequence
taatacgactcactatagggagattctgagacactgaccatgtgcccagtgcacc

SEQ ID NO: 1250 - DNA, 32 bp, Artificial Sequence
  Primer sequence
cgtcgtgggtggagtcctcgcgctgggcttcc

SEQ ID NO: 1251 - DNA, 22 bp, Artificial Sequence
  Primer sequence
atgctctgtgtcctctatcaga

SEQ ID NO: 1252 - DNA, 20 bp, Artificial Sequence
  Primer sequence
gaagtcagtatggagggggt

SEQ ID NO: 1253 - DNA, 58 bp, Artificial Sequence
  shRNA oligo
ccgggcaagtgagaggacacataggctcgagcctatgtgtcctctcacttgctttttg

SEQ ID NO: 1254 - DNA, 58 bp, Artificial Sequence
  shRNA oligo
aattcaaaaagcaagtgagaggacacataggctcgagcctatgtgtcctctcacttgc

SEQ ID NO: 1255 - DNA, 20 bp, Artificial Sequence
  Primer sequence
acgggaaattctgcgaaata

SEQ ID NO: 1256 - DNA, 20 bp, Artificial Sequence
  Primer sequence
ctttccagagaacccaggtg

SEQ ID NO: 1257 - DNA, 23 bp, Artificial Sequence
  Primer sequence
cattaccacagggaccccatttt

SEQ ID NO: 1258 - DNA, 23 bp, Artificial Sequence
  Primer sequence
gatacggggaatttggcattgtt

SEQ ID NO: 1259 - DNA, 22 bp, Artificial Sequence
  Primer sequence
ctgtctgcatttgacggtgaac

SEQ ID NO: 1260 - DNA, 22 bp, Artificial Sequence
  Primer sequence
ctcctctcgcaggtaccacagt

SEQ ID NO: 1261 - DNA, 18 bp, Artificial Sequence
  Primer sequence
gccgtaaagatgaccaca

SEQ ID NO: 1262 - DNA, 20 bp, Artificial Sequence
  Primer sequence
ggagaaacccctaagctgta

SEQ ID NO: 1263 - DNA, 22 bp, Artificial Sequence
  Primer sequence
agcatccctagacccgtacagt

SEQ ID NO: 1264 - DNA, 23 bp, Artificial Sequence
  Primer sequence
gggttcctataaatacggactgc

SEQ ID NO: 1265 - DNA, 21 bp, Artificial Sequence
  Primer sequence
gcaggcctagtaaccgagaca

SEQ ID NO: 1266 - DNA, 19 bp, Artificial Sequence
  Primer sequence
agttttggcgatgggtgct

SEQ ID NO: 1267 - DNA, 22 bp, Artificial Sequence
  LNA molecule
gtgtaacacgtctatacgccca

SEQ ID NO: 1268 - DNA, 15 bp, Artificial Sequence
  LNA molecule
cactgcattttagca

SEQ ID NO: 1269 - DNA, 14 bp, Artificial Sequence
  LNA molecule
aagtcagtatggag

SEQ ID NO: 1270 - DNA, 15 bp, Artificial Sequence
  LNA molecule
aggggctggggctgg

SEQ ID NO: 1271 - DNA, 16 bp, Artificial Sequence
  LNA molecule
atagacacacaaagca

SEQ ID NO: 1272 - DNA, 12 bp, Artificial Sequence
  LNA molecule
aaagcccgccaa

SEQ ID NO: 1273 - DNA, 17 bp, Artificial Sequence
  LNA molecule
gctaaatgcacacaggg

SEQ ID NO: 1274 - DNA, 16 bp, Artificial Sequence
  LNA molecule
cagtgcagaggttttt

SEQ ID NO: 1275 - DNA, 20 bp, Artificial Sequence
  LNA molecule
tgcaataactcacaaaacca

SEQ ID NO: 1276 - DNA, 20 bp, Artificial Sequence
  LNA molecule
acccacccatccacccaccc

SEQ ID NO: 1277 - DNA, 34 bp, Artificial Sequence
  Primer sequence
  misc_feature (29)..(34): n is a, c, g, or t
ctttccctacacgacgctcttccgatctnnnnnn

SEQ ID NO: 1278 - DNA, 37 bp, Artificial Sequence
  Primer sequence
caagcagaagacggcatacgagctcttccgatctggg

SEQ ID NO: 1279 - DNA, 58 bp, Artificial Sequence
  Primer sequence
aatgatacggcgaccaccgagatctacactctttccctacacgacgctcttccgatct

SEQ ID NO: 1280 - DNA, 34 bp, Artificial Sequence
  Primer sequence
caagcagaagacggcatacgagctcttccgatct

SEQ ID NO: 1281 - DNA, 18 bp, Artificial Sequence
  Primer sequence
gccttttgtcacctcact

SEQ ID NO: 1282 - DNA, 20 bp, Artificial Sequence
  Primer sequence
caaactcactgcaaggtctc

SEQ ID NO: 1283 - DNA, 20 bp, Artificial Sequence
  Primer sequence
tactgggtctggattctctg

SEQ ID NO: 1284 - DNA, 20 bp, Artificial Sequence
  Primer sequence
cagttccgtggtctttagtg

SEQ ID NO: 1285 - DNA, 20 bp, Artificial Sequence
  Primer sequence
ggctatgctcatgctgtaac

SEQ ID NO: 1286 - DNA, 21 bp, Artificial Sequence
  Primer sequence
gttactggcatctttctcaca

SEQ ID NO: 1287 - DNA, 20 bp, Artificial Sequence
  Primer sequence
ccacaccgagattgagattg

SEQ ID NO: 1288 - DNA, 20 bp, Artificial Sequence
  Primer sequence
gccaggagaaagaccattac

SEQ ID NO: 1289 - DNA, 18 bp, Artificial Sequence
  Primer sequence
tgtgaaccctttcctgga

SEQ ID NO: 1290 - DNA, 19 bp, Artificial Sequence
  Primer sequence
cttcacaggtctctagcca

SEQ ID NO: 1291 - DNA, 19 bp, Artificial Sequence
  Primer sequence
cgaggacttcacgcacaac

SEQ ID NO: 1292 - DNA, 20 bp, Artificial Sequence
  Primer sequence
ttacagttggagggtcctgg

SEQ ID NO: 1293 - DNA, 18 bp, Artificial Sequence
  Primer sequence
caccctgaacatccaaca

SEQ ID NO: 1294 - DNA, 20 bp, Artificial Sequence
  Primer sequence
catctgcttttcctacctgg
